United States Patent Application Publication US 2004/0014955 A1 - sequence listing, part 2

SEQ ID NO: 3211 - protein, 480 aa, Cryptococcus neoformans
  MISC_FEATURE (79)..(79): Xaa = any amino acid
MRSKSLVFRVAIYIIPLIISAYLFLPYPNKHSYSIVAMSLSSKLNITDVDLKGERVLIRVDFNVPMDKEGKITNPARIXAALPTIKYAIDNGAKSVILMSHLGRPDGSPNPKYSLKPVASKLSELLSKDVKFLPECVGDEVKSEVLKGENGQVFLLENLRFHIEEEGKGKKGDEKVKADPAAVKKFREQLTELGTVYINDAFGTAHRAHSSMVGVQLPKRAAGFLMKKELEYFAKVLEKPERPFLAILGGAKVADKIQLIENMLDQVNTLIICGGMSFTFKKTLDNVEIGTSLFDEAGSKQVKDLVEKAKKNNVKLVFPVDYVTADKFDKDAKTGSATDESGIPSDWMGLDCGPKSRELFAQTVAEAKTILWNGPAGVFEFPAFASGSNALLEACIKAAKNGSTVIVGGGDTATLVAQAGKEDELSHVSTGGGASLELLEGKTLPGVAELSEKVTCAIVERWSRPPRDQKYRASTVLRRK

SEQ ID NO: 3212 - protein, 485 aa, Cryptococcus neoformans
MHPDDDYYTAGPKRFQQKRQTRIKEYFLVRLFTFQARERHGPPAERSEHLKTLFLTSYEKGAECIYFLRKHLFFSFLCFSSIHAQAMASYTPYSSRPHTPLGLSPRGSYTNLASAAYDASSPGGHGAKDEKERLRAEREVQEALLKAQDGVEKAKKEEVCMPASTTVLPILSYCVASIMMTVVNKFVYPGIIVFSDTDRWIVLAIQSFVCVACVWLAKRIGVINFRDWDMNDAKAWFPVSSLLVAVIYTGSKSLQFLSIPVYTIFKNLTIILIAYGEVIWFGGHVTPLTLCSFFLMVGSSVIAAWADISTTLVMDTMNVGYLWMFINCLASAGYVLFMRKRIKVTGFKDWDSMFYNNLLSIPVLFVFSLIIEDWGAASFSRNFPEEGRAFLLSAIAFSGAAAVFISYSTAWCVRICGATTYSLVGALNKLPVAASGILFFGDPVNFGNVSAILVGGVSGIVYAVAKTNQAKVEKSKQARGGESKA

SEQ ID NO: 3213 - protein, 502 aa, Cryptococcus neoformans
MSSDKTNLFPTLGEVADRTGKAESTGLEQEGDDRQMQEIESLCMRCHENGTTRLLLTSIPYFKEIVVSSFRCDHCGHRDTEIQSAGEIQPKGVSYTVHLLTRADLDRQIVKSNWATITIPDIQLTIPPGRGQINTVEGIIRDTVRDLNISQPVRRVMDPETGKKIDELLEKLRAAIDMEEDDEDDGEKPFVPFSMIVDDPSGNSYFQFKGSQSDPQWNMRAYSRTFDQNVILGLVARPEDMSEEQPEGVPIVAADHKLSSAEEFESKRNKNVINRDDGTVVPDEIYSFPATCSSCGHQLETLMQQVNIPYFQDIIIMSSNCYACGYRDNEVKSGGSIAPKGKRITLKVEDEEDLSRDMLKSDTAGLSIPEIDLVLQPGTLGGRFTTLEGLLNEIYTELSTKVFRAGDSTTAGIGQADSSAGEDEANFGDFLKGLKECMSAQRQFTLILDDPVSNSYLQNLYAPDPDPNMQIEVYERTFEQNEELGLNDMVVEGYNKEAEGTA

SEQ ID NO: 3214 - protein, 515 aa, Cryptococcus neoformans
  MISC_FEATURE (490)..(490): Xaa = any amino acid
MLLIIFPPHGHSTLSTSCHTVLFLKNIHKMSMAASSSTATVQPSGIITQPPPPSTLREQRIATHSHIKGLGLADDGTAMSSSQGFIGQILAREALGLHLSLLKGGKYSGRPLLLVGPPGTGKTALALALSQELGSKVPFCAMVGSEVYSGEVKKTEVLGSCFRRAIGLRIKETKEVYEGEVTELTPSEAENPLSGYGKTISHVIVGLKTVKGTKQLRLDPSVYESIQKERVVVGDVIYIEANTGAVKRVGRSDAYASEYDLEAEEYVPLPKGDVHKRKELVQDVTLHDLDMANARPQGGQDIMSVMGQLVKGGRTEVTDKLRREINKVVDRYIEQGVAELVPGVLFIDEVHMLDMECFTYLNRALESPMSPYVVLASNRGISTIRGTEYDGVAGSASEGIRAPHGLPVDLLDRCMIVKTQLYTRDEIRRIVEMRCKVEGIAISSEAVDKLADEGERSSLRYALQLLTPAGIVSKNKGKGEVGVADVEELXELFLDAKRSAGVLRSTEDFEEVLER

SEQ ID NO: 3215 - protein, 486 aa, Cryptococcus neoformans
MATVLPEPEGIPCIRPAASYDPLTELSKPFTIDPASRSYKHQYANIYFVRLVEQRPAVEKKATEKWKDVKGNPPLLPRILNLTRSQLCYIVGTVYMEMPLKPNILEDMARDVGRLAILSTTKFFSAQDSIHLEDESGRVRLIGDAIQRERDREGGGLVTGVIMAALGMETPSGDFEVIDICFAGMPDKLVLNPAPSKNAKTWIAMVSGLSIGTQEASTDLKAEMLVEWLMGEIGGHSDQLGGGRIARLIIAGNSLTLPVKGEDDKKIVRVKRFNSTSKPLFPNHPTKTLATLFADLLSSSLPIHLIPGPSDPAGATLPQQPLPKILFGGKAKTEGLECETNPTWMEVGGRSFLTTGGQAIDDIFKYVPGNSRLGMTQRTLEWRHMAPTAPDTLWIYPFPDTDPFIMNYRPDVYIVGNQPEFETTIIGDEDAPTRLVLLPSFAKTGVIAFVCLETLECRTLEFEAPMWVGETMAGEAEGVDNEEMES

SEQ ID NO: 3216 - protein, 528 aa, Cryptococcus neoformans
MKPMVSKPNSPTEGPQSSVGSWHMILPTIANGFAEGPDGKLSVKKTEKNFEFFTKSKVGRVGLMLVGLGGNNGTTVLATNLANKHNISWHTKNGIQQPNYIGSVVRASTVRLGTDPATGKDVFVPISDMLPMVHPNDFVIGGWDISSLSMDKAMLRAKVLEWDLQRQLIPLMEDVKPLPSIYYPDFIAANQADRADNLIPGGDKKAHLEHIRADIRRFKADNHLDSVVVLWTANTERYADIIPGVNDTANNLLKAVETSHEEVSPSTIFAIASILEGVPFINGSPQNTFVPGCIELAEKHKAFIGGDDFKSGQTKVKSVLAEFLVNAGIKPLSISSYNHLGNNDGKNLSSQRQFRSKEISKSSVVDDMVAANHILYKTAEDLSKATGEVVKKGEHPDHIVVIKHVPAVGDSKRAIDEYYSELLMGGRNVMNIFNECEDSLLATPLIFDLAILAELLTRVTYRENATGEWQPLYSVLSLLSYMLKAPLVKPGEDVVNSLNRQRNALEQFLKACLGLEHSNDLLLNTRVW

SEQ ID NO: 3217 - protein, 489 aa, Cryptococcus neoformans
MRNELNRMVANEQDPAKKKSLVKRNSCKVADYGLVKMFEAEMQSFFILFNRFLTERAKGEKLDWDKINPPKPEQVRPYEVLPNVDPSILNKLAVLKLNGGLGTTMGCVGPKSIIEVRDNMTFLDLSVRQIEHLNEKYNVNVPFILMNSFNTDEDTARIIQKYQNHNINILTFNQSRYPRVDKESLLPCPRESSSDKSNWYPPGHGDIFDALTNSGLLDKLIAAGKEYIFISNVDNLGAVVDLNIFQTMIDAQAEYVMEVTDKTKADVKGGTIIDYDGKPRLLEVAQVPKDHLDEFCSTRKFKIFNTNNIWCNLRAIKRIMDEDALNLEIIVNNKVTDDGLAVIQLETAIGAAIKHFDSAIGINVPRSRFLPVKSCSDLLLIKSKLYNLEHGVLTMDRSREFGGTPVVKLGGEFKKVANFEKRFKSIPNITELDHLTVSGDVWFGKSVRLAGTCIIVATEGNKIMIPDGTNLENKLITGNLSIIDHSMRM

SEQ ID NO: 3218 - protein, 501 aa, Cryptococcus neoformans
  MISC_FEATURE (435)..(435): Xaa = any amino acid
  MISC_FEATURE (437)..(438): Xaa = any amino acid
  MISC_FEATURE (429)..(429): Xaa = any amino acid
MTTGTTTVVSSPGKVLIAGGYLVLDTHYSGLVIGTSSRFYSCVSSRATSSRATSSTPSIDADTNNDIDTDTCQNKATISVRAGQFPSDASTWVYCISKPSASASASAGEDGEDGEEGGDGTLYLKLEQTNEEQAGKNKFIFITLCKVLEYVYESILAHVGDEETALDELMKRIKGGGDGGDGLDVVVFADNDFYSQREQVRMIYFLLTSLSLPTRISSLPHLPPFTPLPRPIPATNKTGLGSSAALVTSLVGSLLSHLHITHSSPEGSIADDDKAVIHSVAQLAHCQAQGKVGSGFDVSSAVYGSHLYTRFSPSILTPLMSLAPFSRPRPSPGSTSPLLLDALHPSKWDNKSIPFRLPKHLRLLLADVSCGTDTPSFVSSVLKWRNNDREKADEVWARLDNANRALGEVLNDMLLNLPTTPSPSRTLHXLHRLAXSXXSIRALLREMSDLSGVPIEPKEQTRLLDACGQVKGVVGGGVPGAGGYDALYLLAIDHNPYSRCR

SEQ ID NO: 3219 - protein, 482 aa, Cryptococcus neoformans
  MISC_FEATURE (319)..(320): Xaa = any amino acid
MSPLSHHVAGIAALMPSPQSRSGSVAPGESATPASATTMTSREPTSSTEFKNALDESDIQILKTYGQGPYSLHLKKIENQIKDIQKRVNEKIGVRESDTGLAPANLWDIPADKQRSGRPLQVARCQTIIKAGDQPLNPQDGAGAGNPEGDRYVISIKQVAKFVVGLGDEVSPTDVEEGMRVGQPLTIQNRVDQVTYKIMLPLPPKIDPSVTMMQVEERPSITYADVGGCKEQIEKLREVVELPLLEPERFVSLGIEPPKGVLLYGPPGTGKTLCARAVANRTDSTFIRVIGSELVQKYIGEGARMVRELFEMARSKKAXXIFFDEVDAIGGARFDDGAGGDNEVQRTMLELINQLDGFDPRGNIKVIMATNRPDTLDPALLRPGRLDRKVEFSLPDNEGRTHILKIHGKSMSVERDIRYDLIARLCPNATGAELKAVATEAGMFAIRARRKVATERDFLDAVEKVIRQGSKFSSTALYAQYN

SEQ ID NO: 3220 - protein, 533 aa, Cryptococcus neoformans
MSTKESTDMGRVVQGRCIKSDVGHSKESFAYHLLRQINLTAAASVADPSNHTLAYGTTTEGAGKHLVVDFSSPNIAKPFHAGHLRSTIIGAVICNLHEANGWKVTRLNYLGDWGTQYGLLSVGFDKYGNEEELVKDPIHHLFQVYVKINNARDEQKKKFEAGETIPDEENIHLLAKKVFKDMEDGEPKAIAQWARFRDLSIEKLKGTYKKLNVHFDVYWGESQVSEESMERAVRIVQEKNLTCEDRGALLVDLTKFKMDKAIVRKGDGTSIYLTRDLGGAYDKYQKYKFDKHIYVVQAAQTLHFNQLFKTLELMGEPYADKLEHVTFGLVKGMSTRKGTVVFLEDIIAEATDVMHEQMKSNEAKYAQVEDPEGTSAIIGTTAVKIQDMAGRRINDYDFDIKRCTSFEGDFGPFIQYSHVRLCSVQRKNPNVLVPQSINEIDLSILNEPKVNDIIMHLALYPTHVRNAFLQSEPSQLVTWCFKLGHLVGAAWETVKVTGQEEEIAKARLFFYVTTREVLASAMRMLSLTPIERM

SEQ ID NO: 3221 - protein, 524 aa, Cryptococcus neoformans
MATQLPPPKRQKSAYSQSQMPKVEEPAKDVPSIVVQFKSAEDGSSLGPAINLPADTARDALQMLVNKLRGEDEDPLPYAFHLVPKEPSTSTTPASARVQINNSIQSDALEAKKSTFSPEDVFELWCEPQAVFRVRSVGRCSATLTGHSSPILCCAQSPTGRYAATGSGDANCRVWDMETETPKWTLSGHKGWVLCVEWDSREKILATGGHDGQVRLWNPATGQPYGAPLLGHTKWVTALAFEPLHLVPKSSSGPRIASASKDGTVRVWNTSTRKLEFVLTGHAASVNCLRWGGENVIYTGSSDRTVKVWSGVDGKLIRTLSEHAHWVNTMALSTDFVLRTGPFDHTGKTPTNDEEVKKRAEERYKSVITNQPETLITGSDDHTLYLWPDQASSSFSSTSTPKKPLARLTGHQKQVNHVAFSPDGRMIASAGFDNAVKLWEGRTGKFIASLRGHVAAVYRVAWSADSRMLVSASKDTTLKLWNLKTYKIRVDLPGHTDEVYCVDFVADKVVSGGRDKTVKMLVRQ

SEQ ID NO: 3222 - protein, 539 aa, Cryptococcus neoformans
MIPRSARLRLPSSSLSAHARRRLYTPVRPPLKLAIIGAGPSGFYTASRILSLIPPTSPEGQKLEVHMYERLPTPYGLVRYGVAPDHPEVKNCQHKFDELAHDSRFKYFGNTLVTSHPSSTFSPSPTEKAPSYTYPHALRLSFSDIMPYYSTLILTYGASLSNPLNAVPGSSSNSDPLTGVYPALALVSWYNSHPAYADLPVNLEKVKQVSVVGQGNVALDVARMLLKPVSSLAETDLSEEVLDVLSESSVEKVRVVGRRGPGQVAFTTKEFREMLSIPDVGYAGIDPALMEYAKENIEKGNGERMKKRLLQLMDKTKQQDGRKIFELDFLKGPKSFLPSTENASQVGEVEWNLNQLEMRPATESQPASIVAKSTGETIRTPADMVVESVGYRSEPLTGPGHEWDLPFDIARGRVSNLNGRVIAEEGGFVPGVYAAGWAARGPVGVIATTMNDAYALASTILDDIYAPTTSSPAACMLNSRPYAGIPEKVQNAAMEGKIVVDLEGWAKIDKAEVERAKRMGSGKEREKFRRVEDMLAVLQ

SEQ ID NO: 3223 - protein, 520 aa, Cryptococcus neoformans
MNAAKGILGLFDGPVADAVRTSLGPKGMDKMIQTSNGEVVITNDGATILKHMAVLHPAARMLVELSQAQDIEAGDGTTSVVVLAGSLLSAAEQLLAQGIHPTTVAQSFQNAASKAVEFLEGISMPVDLNDRESLLRAARTSLNSKIVSQYSSTLAPIAVSAVTRLVTSASSNVDLRDIRIVKKVGGTIEDTELVEGLALNQIAMTNAGGPTRMEKAKIGLIQFQLSSPKPDMDNQIVVNDYRQMDKILKEERQYLLNLCKRIKKTGCNVLLIQKSILRDAVTDLSLHFLAKLKILVIKDIERDEIDFIAKSTGAKPVADIEAFTEDKLGSAELVEETNQSGAKVVKVTGVKNAGKTVSVVCTGANELVLEESERSLHDALCVVRCLVKKRALIAGGGAPEIHVSRLLTDYSHTLKGKEAYCFQAFAEALEVIPTTLAENAGLNPIAIVTELRNKHALGDRNAGINVKKGIISNILEENVVQPLLVSTSALELATETVALILRIDDIQVRILLLGSPPLLT

SEQ ID NO: 3224 - protein, 527 aa, Cryptococcus neoformans
MHRPARGALRISTRLATRPPLPALIHSRPYSLSATEPPPNLQPHQYPAFERLSTALSLKQPCFGARGDEVELLTGPEVFYSRLLDMIKGAKRRILISSLYIGAEEGELVEAIQAALTNNPQLRVVFILDYHRATRLATSTNLPPSTAHLLLPLVERFSDRCEVWLFRSPKLKGLMEKIVPARYDEGWGTWHGKWYGADDEVIISGANLGRSYFTNRQDRYIHFRSNPSLLSYLSSLTRLFTQYSYLLHHSPPPHIPPYNTVPLPSPENPDNSKLPSSSVSIRPPFQNSWRASNSARSRRVDVDTWFWPVLQAGVLGIKEEERAMAEVWKAVRESHEGEQNESRKVEVDLTSGYFGLYKKYKQLVVESPASVKIIAASPKANGFYGSKGFSRLIPEGYTLLETRFHRDTVRAGRTWNVEKGTGVRLKEWEREGWTYHSKGLWVSPPDSKPFLTFVGSSNLSTRSLTLDTELSMVMMTSSPTLRRALDTELKHLDEYATQVGEETWKLEERQVSWLAWLLVALGVEGML

SEQ ID NO: 3225 - protein, 491 aa, Cryptococcus neoformans
  MISC_FEATURE (132)..(132): Xaa = any amino acid
MSRFKISGALWDSIHHYSSFPQTGVSLQQMIHFGHNPTPGTLLKASQFLSEELPIRLSHRVVELNALPDGLAKMPSINKVKEWYAQSFEELVTFPKPRFKPELEGILNSEPSNFRFPLISLTVLPETAEQNXAFPSSTPNPSLDPLMDEGPVGSGLLVERHNQGNGNGNGNGNISGNGNGNGNGNGQRLRIPMERRYYSPPPATLVYPPEVHEYNERFTHLLENIKKRHDPTVTTVAQGVLEWKRKRKTGRIGVPIQEWLDRFYMSRIGIRFLIGQRESMTMPREKRDRLILEPIDVALNTLQPHPDYVGIICTRANVHDICHEAIENARYVCEEHYGLFKGPPIQLLCPKDLTFPYVPGHLSHICFELLKNSLRAVVERFGVENEEAFPPIKVVVVEGREDITIKISDEGGGIPRSAIPMIWTYLYTTMSDEGLEATIEQSDFKAPMAGFGYGLPLARLYARFFGGDLRLISMDGYGTDVYISLNKLSSR

SEQ ID NO: 3226 - protein, 516 aa, Cryptococcus neoformans
MTLDEERIVGELARVNGEAGVEAGGDEIGMGEVRSRALPPKSIYACLEEFTESRRTTRGACAVLLTVGHYTVLRSALFIFLLCFLLSPPPPSTLCICANDSNHLHHVRWYRYRKVRQSLLNLRPSTLRFITDNFARHKITSQRGAHFTIMVVGQSGLGKTTLINTLFATEICSPRNYRQRWVSFELDKTTEVEILKADLEERGFNIKLTVIDTPGFGDYVNNRDSWGPIVDFIDDQHESYMRQEQQPFRKEKQDLRIHACLYFIKPTGTTLKPLDVEIMKKLGTRVNLIPVIAKADTMSPEDLHNFKTIVRETIIAQNISVYTPPVDLDDEAAAEHARAMQAVMPFSIIGSTQDVTTPDGRVVKGREYLWGVAEVENEDHCDFKKLRSLLIRTYMLDLITSTEEKHYEAYRLAQMETRKFGEPKVKKLDNPKYREEEETLRKRFTEQVKLEEARFRQWEQHLIAERDRLNKDLEQAHSAIKALEVGVISPSLCGKMADMFRLNWTRWLPTIVKGGL

SEQ ID NO: 3227 - protein, 496 aa, Cryptococcus neoformans
  MISC_FEATURE (361)..(361): Xaa = any amino acid
MYKTTTATILTLILSLLVLEQLVYRAKKAHLPGAKWTIPVIGKFADSLNPTLANYKAQWNSGPLSAVSVFNIFIVIGSSNEMARKILNSPNHAEPCLVASAKKVLLPENWVFLHGKVHADYRKALNVLFTKQALSIYLPIQEKIYRSYFNKWMSDPAPAQQYMMKMRDLNMDTSLSVFIGPYLTEAQKQEINDKYWLITISLELVNFPLAIPGTKVYNAIQARKIVMKYLSAASAASKIRMEDDDAEPECLLDHWVRAMILARRAKDDGEQTRLLSREYSDHEIAMVLLSFLFASQDAMSSALVYTFQLTADHPEVLEKVREEQYRVRGNDLERPLTLDMLDDMVYTRATIKEVLRFRPPXIMVPYMTTKPFPVSPEYTAPKNSMIIPAFWNSLHDETCYPEPDRFLPERWLPQADGSAPIADSKPQNYLVWGSGPHKCIGGQYASMHLAATLGTASVLMDWKHERTELSDEVQVIAAIFPKDHCLLKFTPRAPPS

SEQ ID NO: 3228 - protein, 501 aa, Cryptococcus neoformans
MESRNLDHRRNNFKGKTQFSAQELRRRREEQQVEIRRQKREENLAKRRNLQSVITDEGIESDDEASMDSTALGDVLPGMLQAVYSEDANAQLDATMKFRKLLSKEKNPPIDKVIQCGVVPRFVEFLSSTNSMLQFEAAWALTNIASGTSEHTQVVIGAGAVPHFIALLSSSVLDVREQAVWALGNIAGDSPKCRDYVLGEGALQPLLGLLNENHKLSMIRNATWTLSNFCRGKNPQPEWELISPALTVLTKLIYSLDDEVLIDACWAISYLSDGSNDKIQAVIESGVCRRLVDLLMHPSTAVQTPALRSVGNIVTGDDLQTQVVISSGALPALLSLLSSPKEGIRKEACWTISNITAGSPMQIQAIIDANIVPPLINILANADFKTKKEACWAISNATSGGLQEPNQIRYLVSQGCIKPMCDLLTSMDNKIIQVALDGLENILKVGEVDKDAAGPGGVNKYAQYIEEAGGMVAIHNLQHHENLEIYKKCFYIMDSTFKHQS

SEQ ID NO: 3229 - protein, 529 aa, Cryptococcus neoformans
MDKGGNGLLVPSSPLSPSGVSPSSSPQPSQSFTKQANSNTVVETLNIHLPQLPPSHTRLTSKPRVELSSTITAADYNYRYMFEKLSERSEALDDSIDEYADAIKDAYGLSELGDPHFVSDESIYTVGRVLSNTTSSKSDKTALKNSFHLQSSRLIGAGKRIALELPEEKLKVRGGAPGVKGFSLYSGCLVCVKGRNGGGSKFVVEEVLLLPPSLLPQTPASELIDFQYGDKLKGEPLSLMVAAGPYTLNENLLFEPFETLVDKVLEDRPDVLILLGPFVDSQHPIIKSCAVTETPQEIFRKQISSRLQKVVTQSPSTVIILIPSVRDVVSHHMAFPQSMLEKEYLGLPKKVKALPNPCTFSVNEVTISLSSVDILFHLGQAHAPIRAQEADADPGMSGSPAPDPLANHIRQVLGQRSFYPLFPPQEDVAGEVNLDVTHYPLLKMDQAPDILILPSRLNKFVKIVDSTLVINPSHIARARATGHYAKVIIHPTAREVLEESMEVDGEESLCEHQVYERARSEIWDMIPCI

SEQ ID NO: 3230 - protein, 506 aa, Cryptococcus neoformans
MSGSLTHVLFEGPSGYGLFTVNLQEEVAAKSKQLQDSIADLGIFSRMVQLASFAPFTSAAQALENANDVSEGVLNPHLQALLNLIVPDAAGKGNKKQSGVLLGVAERGLAGAIQGEMGIPCDTSERALELIRGVRLHQEKILIKGGMQKGDVTVAQLGLGHSYSRGKVKFNVNRSDNMIIQAISLSDQLDKDLNTFFMRVREWYGWHFPELYKLVPDAHQYALLAVLIGDRTALSEDSLEEMQEILDDDETRAKNVLDAARASMGSDISEVDLINISNFAERVVKLAEYRKSLRRYLTEKMNVVAPNLSALIGETIAARLISHAGSLTNLAKYPASTVQILGAEKALFRALKTKGNTPKYGLIYHSTFIGRAGAKHKGRISRFLANKCSIACRIDCFTDVPTNKFGEALRAQVEERLNFFETGAPVGKNSDAIQKALAAKEEKKKRKSEAMDVDVKEDEEEKKEKKSKKEKEEKKEKKEKKEKKEKKEKEGREEKEGKKEKKKKEV

SEQ ID NO: 3231 - protein, 518 aa, Cryptococcus neoformans
MAAISISARWMLVGRVKRTRRRMMEIGMWTMRIGSWPMEVYFTKQYNRVRQQHAATSGSAPLPARNLSQQTKSKLSKSNPTAGSGVVTNPKAAQDKHDKDKSDRATQEQVLDSRTRLVLAGLVNRGVIGMIERCISTGKEANVYYSSPGRAVKIYRTSILVFRARQNYIVGEQRFRGEYTSSRNPRKMIRVWAEKELRNLRRLVQGGVRAPVVHECKENVLVMDFLGKGEVASPRLKDAEIPEDRLPDLYAEMVIATRRMYQHCHLVHADLSEYNILLHDNHLYIIDVSQSVEHDHPRAFDFLRSDISNIEEFFSRRGVATLGIRKSWEFIVTENIGLSPTGSASSSLEMEKGDDGERRLVGVLEEWLKEPSDKTDDAVFMESYIPRTLAEVYDPERDVDVLKSGGGDELIYAGVTGLKLAHESANAKVKEKEKEKQSASAGAGAGADDANKREEVDADENVEKGERVKGKCKDEGKNDKTSKSERKKAVKEEQREKRKTKMPKAEKQKLIKKSASRH

SEQ ID NO: 3232 - protein, 540 aa, Cryptococcus neoformans
MVILPPPQTSGSAPQTPTTKPPAKRVPEASSSKVTLDDSQPAPATSSDAVLGAWSAPGTDYERVPFSTLNLSPPTTAAIERMGFETMTEVQARTIPPLLAGKDVLGAARTGSGKTMAFLIPSVELLSTLRFKPGTGVIIISPTRELALQIFGVAKELMQGHSQTFGVLMGGANRKAEADKLVKGVNLIVATPGRLLDHLQNTKGFVFKNLKALVIDEADRILEIGFEEEMKQIIKLLPSENRQSMLFSATQTTKVTDLARISLRPGPLYINVDETKEASTADMLEQGYVVCESDQRFMLLFTFLKKNLKKKVIVFFSSCNSVKYHAELLNYIDVPVLDLHGKQKQQKRTNTFFEFINAPAGILLCTDVAARGLDIPKVDWIIQFDPPDDPRDYIHRVGRTARAGKSGKSLLFLLPSELGFLRFLKVAKVPLNEYQFPQKKVADVQKQLESLISKNHYLNTSARDGYRSYLQAYASYSLKKIFDVNKLDLAKVGKAFGFAVPPKVNISVGSVKAKKSRDEDESSDDDGQPKKAYYRNRGRK

SEQ ID NO: 3233 - protein, 534 aa, Cryptococcus neoformans
MNVFADEVSKATEERGENARLSSFVGAMALGDLVKSTLGPKGMNKILQSASNSTITVTNDGATILKSIHLDNPAAKILVNISKVQDDEVGDGTTSVCVLASELLREAEKLVTVQKIHPQTVAEGYRIASRAALQALEASAVDNKNDNAKFREDLFNIARTTLSSKVLAQDKDYFANLAVDAVLRLKGSTDLEHIQIIKKVGGKLTDSYLDEGFILDKTIATNSPKRIENAKILIANTSMDTDKIKIFGARVRVDGTGKLAELERAEKEKMKAKVQAIASHGITCFVNRQLIYNYPESLLAEAGIMSIEHADFEGVERLALVTGGDIASTFDAPEKVKIGRCDVIEEIMIGEDKLIKFSGVAAGEACTVVLRGATSQMVEEAERSLHDALSVLSQTVKETRVTLGGGCAEMLMSCQVEEAARTVKGKKALAVEGFARALRQMPTIIADNGGYDSSDLVTKLRAAHYEGQSDAGLDMDKGEIGSMRQLGITESFKLKKQVVVSASEAAEMILRVDNILRSAPRARGSLEWIGNCAQ

SEQ ID NO: 3234 - protein, 545 aa, Cryptococcus neoformans
MSGTLISSLVWVPRGRAAEKPKKYQLDEDEIERVGKLGGPGVLEQLKSEIAAVEDGEEMEGGDEEEDWEDEDDEEGNEEADNDDDDEKMDEDKEPEKPFDPNDLSAFKMDEYDEEESKGVGKYLSYDEEENEDEELVLLPTDSMIISARTTSDLSSLDFHVYADVDENLYAHHDLMLPAFPLCVEWLDFSPGPDANGAAPEGAKPGNYVAVGSFDPSIEIWDADLVDGLYPRAILGPSPSLEKPEAKPLGTGKKKRKQMVQPAANADYHVQPVLSLSWTPNHRNLLLSGSADGTIKLWDLTRESPMGAMRSWDKVHGGEKVQAVEWNRSTVGGLDKVCLSAGYDRTVKVWDGRAVDEAIGLQVASDIECVRWDPWEPYSFYVSLENGLILSYDSRSSGFLTTAQPKFTLSAHDGPASALDINPHIRGCILTAGMDKTVKIWNVQDEESEGIPRRKREINLATSRDLGLGRVFAARWSPDPETPLTVAAAGSKATLQVWDVASNPGARKAFGERLRRHGRELGEIKKGGGIVAVDGGEEEESEGEE

SEQ ID NO: 3235 - protein, 542 aa, Cryptococcus neoformans
MVAMEYTPDAAGQESYILCADCGTVISSANGAGLCKKLSACDWYSVGCLRNTVDITEGIPKEATLNFCRGCEKFLSPPNTWIAVQPESRELLAICLKKIARPLMKVRLIDASFIWTEPHSRRIKLKITIQKEVLAHTVLQQTFELTLVVHTGQCPSCTRLAAKNTWKASVQVRQKVTHKRTFLWLEQLILKHNAHKDTINIAEKRDGLDFFYSERNNAIKMCEFLAGVVPVRVKSSEQLISSDTHSNTSNYKFTYSVEIVPVCKDDLVCLPKSLARAWGNISPLTICSRVGNTIHLLDPMTLQQTDVAAPVYWRQPFDSLTTVADLVEFIVLDVEPSGPVRGKYVLADAQVTRSSSTGNNADDDGMGDDGIYHTRTHLGGILQPGDTVLGYHLTNANFNSDSFEALESGRIPDVILVKKTYPNRRKKSRPRNWKLRSIAKEAEDVQDGTVGRGALGRRGGVDQKNVERDYELFLRDLEEDKEMRAVINLYKADAPEEGEDEAMAAVGEEDEDDEEEDFPEIDMDELLENFEELDMDDGAEVL

SEQ ID NO: 3236 - protein, 522 aa, Cryptococcus neoformans
MVVEKKKKSSSGCLADALIDRPTFVLFPKTTERAGICQKHSLFLLLFRILLYSTLHSLPAPIIPIPPKMSNFDIPARPSNVGILGMEMYFPKRCISEEQLEEFDGVAKGKYTIGLGMGHMAFTDDKEDINSVALTVVSSLLKKYNVDPRSIGRLDVGTETLIDKSKSTKTLLMNLFAESGNTDIEGIDSKNACYGSTAALFNAVNWIQSESWDGRNAIVMCGDIAIYKEGSARPVGGMGACAMLIGPDAPLVVEPVHGTYMANTWDFYKPDLSAEYPTVDGPLTIAAYLGALDNAYSTYVQKAEASQAHGIAKFDYVCLHSPYGKLVQKGHARMFYNDYLRNPSHPAFANVPEDVKSLDKTKTYTDKVIEKTFIGIAGDHYKSAVIPGKDCVSRCGNMYTASLYGALASVVSSAPEGIEIGKRIGMYAFGSGCAASFYVLKVNGSTKEIADKLNLKARLAAMDVRPCQEYVDALKLREENHNAVKYAPQGSLDNIWPGAYYLEGVDDLYRRTYLQKPESAQV

SEQ ID NO: 3237 - protein, 576 aa, Cryptococcus neoformans
MDAQEVDEDDEEYKKFLLEFGGGEEEVRKILGMGDQPAILKVLESEGGEDEEEKAAVSKIEKEELERQKQEKEAKKAKDDDDFLMNYILNRGWIDRSEKHVPTYDEVVGPSTEVAEEAAAQTKSTKLKSSHPWGELDEESDFEDRAEEFETEYNFRFEEPGSSTIATHPRDIPSLVRRADDTRKSKRARRAERKAAEKAAKEEEIKREKGKKRREMEKRMNILKHDLEKEGFKDLEWGKLEKVLDGEWDENVWEKIVGGMLSKGDEQEKPTWDDELGDAEYDEEEGEGDFQYEFAEGEGEGEDMDVDEDEGPINMDADFIDEEPSKKSKKKDKKKKNKNKERSPSPLSEDEENQLSIPEKAHALKEAVESYNALAHEDIIEDMPTRFKYTPSAPASFGLTPVEILLATDDELNKLVTMKGIAPYRKGGIGIQGKGLGKRVRELKDKLRERRWGEEPSQTKSREEKKEKKRKRDDGEERGQDERRGKKSEGEATEKSEKVRNGKRLGKKERMRLQKAAEAAGAAPAAAGEPESAPAEKKRTVESGEMPADAPAANGEEGADKKKRRKKKKSKADGEA

SEQ ID NO: 3238 - protein, 560 aa, Cryptococcus neoformans
  MISC_FEATURE (314)..(314): Xaa = any amino acid
MAKMSCPYVRTGNWRNFWVEARGNYVNKLPFAESGATQRPPPALCSLDSPPASIHFIFHIPFPSVSIFSCTFHDGLYHIPLTVRFLELVRPFMSILPEVTAPEKKVVFNHKIAWTAVTLLIFLVCSQVPLYGIMSSDSSDPLYWLRAILASNRGTLMELGITPIVTSGMIMQLLAGAQLIDVDFSLKDDRALFGAAQKLFAMIISLGQATVYVLTGLYGSPSSLGAGVCLLLILQLVSASLIVILLDELLTKGYGLGSGISLFIATNICESIVWKAFSPNTVNTGRGPEFEGAIIALIHLLFTWNDKTRALKEXFYRDRLPNIMNLLATVAVFAAVIYLQGFRIEIPIKSSKMRGQRGTYPVKLFYTSNMPIMLQSALTSNVFLVSQMLAGRFPDNLLVRLLGVWEPMENNPTQLGAVSGIAYYMSAPHSLTSALKDPFHTVIYIAFIVTACALFSKTWIEVSGSGPRDVAKQLKDQNMTLAGHRDASIYKELKRIIPTAAAFGGATLGLLSVVADMMGALGSGTGILMATTIIYGCESLIFSHRLLSLCCWLADQTFST

SEQ ID NO: 3239 - protein, 490 aa, Cryptococcus neoformans
MSTSHLPHHAQEQKIRHEDESEFALPARRSSSIRDQLAAWHANRGDRSFLRVSQLICPQGWLAWTIDGYDFFCVSLTLDSLAEQFDVSPSSITTAITLTLLFRSLGAVIIGLCADRYGRKWTLVFNCLLIMVFELGSGFVNTYQQFLAVRSLFGIAMGGIWGCAAATGLENVPPIARGLCSGILQQGYSCGYLLAAGMFINLTVVQQSKYGWRAIYFFGAGFSLLAAIVRACLPESRQFIVAREEAKAKGISSKQASKNFIRELGNMFRTNCKIFQENWREGSDNQNFFSHGSQDLYPTYLKTTKGLSSSLASKATIISNCGAIVGGTIAGHVSQFVGRRFAILVCCIYTVSAHLLHLLFANTDRLVSQIMAADSISFPSFIQSAWGVVPVYLGEIAPPAFRALFGGLCYQLGNMASAGSAQIEADAGKSLKLAGTDIPDYAAINGILIGAVIAFGIIVVFLGPEGRIPFRKGQGRYRARRGRSCSYRVV

SEQ ID NO: 3240 - protein, 510 aa, Cryptococcus neoformans
MIPMILYASETGNAQDTAERVARAFRANGRAVTCLPMDQFPISALPHTYLLILLTSTHGRGDPPPAMLPLWTALLRSSLPEDILEDVHFALFGLGDSSYERFCYAGKMLLRRMEQLGATKMGEPAWGDERSPNGIEDAFLPWLQQTLDLYLPYLPLISPTPKIIESTVLPPPIYKISPASTSKSVEHDLSDKASTSRTKPDDWVWATLKKNIRLTSKDWWQDVREIELEFDDPDTKPYTAGSICSLQPQSREDDVNMFLEMMELTSQADEVVTIESLLDAGTPTTLRSLLTNHLDIRYSPRKSFFEWLRRLSTNEMERERLDEFISDPDEIHTYATRPSRTIVETLADFRFTRIPMSHILEILPPLRRRQFSIASSWEVIQLLVALIEYKTNLKIPRKGLCSSWLNGLPVGTRIPIHIASPTLFLPQDPEVPIILVGPGTGVAPMRAFVEIRVRQGAAKNTSLYFGCRSSTTDYFFESEWDVHREKGVKIQVAASRDQEERIRAAFDKKG

SEQ ID NO: 3241 - protein, 537 aa, Cryptococcus neoformans
MSAIIPQVQQLLGQVAQFFPPWFAALPTSLKVAIAVVGIPALIIGLNVFQQLCLPRRKDLPPVVFHYIPWFGSAAYYGEDPYKFLFECRDKYGDLFTFILMGRRITVALGPKGNNLSLGGKISQVSAEEAYTHLTTPVFGKGVVYDCPNEMLMQQKKFIKSGLTTESLQSYPPMITSECEDFFTKEVGISPQKPSATLDLLKAMSELIILTASRTLQGKEVRESLNGQFAKYYEDLDGGFTPLNFMFPNLPLPSYKRRDEAQKAMSDFYLKIMENRRKGESDHEHDMIENLQSCKYRNGVPLSDRDIAHIMIALLMAGQHTSSATSSWTLLHLADRPDVVEALYQEQKQKLGNPDGTFRDYRYEDLKELPIMDSIIRETLRMVSHPDFSIYRKVLSDIPVPPSLSAPSENGQYIIPKGHYIMAAPGVSQMDPRIWQDAKVWNPARWHDEKGFAAAAMVQYTKAEQVDYGFGSVSKGTESPYQPFGAGRHRCVGEQFAYTQLSTIFTYVVRNFTLKLAVPKFPETNYRVSLCVPLSLG

SEQ ID NO: 3242 - protein, 544 aa, Cryptococcus neoformans
MTEKQQNSQQPSQLDSTASISALPPQLQQPAAGITGAPGNAEATTSEPPSTKRPRKAIESSEPLTEVILRRLTTIKEGDTVLLRLPSDLVKSVVVQGDNLVQLGKYGAFPASQLIGLHYDITYEIVSSSGSGASTPQPQSLDFSTEETQSKKGNKKNKNKGKDTAADLSETEKTTLSHDEIAELRAQGCTPEEIIQAQIARHEKFGLKTDFSKEKWRRRKEKKYLLFLFYQTVQPLAPSIPNVLYHYNLRSPQSILHLRDDTLSQLLTMANVRPGGRYLVVDDTGGLITAAVLERMGSEGSILLFNESDSPPAWGILQTMNFSDRELEPIKWLNWLEAEEEYQKPAPPVQAEPPTNPIKAAAKQRKYAAQVAELNNTRNELHLGGWDGLILATTLNPISVVARLTPYLLGSAPIVVYSPYYQVLAELLSWSKKDPNYLNDTLTESWERTYQVLPGRTHPMMTTSATGGYLWNATRVSIVIRYADDMLTKTSHPSQFQPESHQRFKRRKTGKAPGKEQLSSVAKDEEAVNESLEIDPEELANEGE

SEQ ID NO: 3243 - protein, 574 aa, Cryptococcus neoformans
MVCKRSCPVVKMGKLCIEVNPNDKKAFISEELCIGCGICVKKCPFDAIQILNLPTNLESHVTHRYAANAFKLHRLPTPRPGQVLGLVGTNGIGKSTALKIMSGKLKPNLGRYDDPPEWQEILKHFRGSELQNFFTKVLEDDIKAVTKPQYVDQIPRSIKVPNMTVGKMFDRQSELPNRDGLEKDLELKHLQSREVSQLSGGELQRFAIGIASVRKADVYMFDEPSSYLDIRQRLAAARVIRGLVNATNYVIVVEHDLATLDYLSDFICVLYGVPGTYGVVTMPYSVREGINIFLDGMIPTENLRFRDESLTFKISETVDELQAPKTRRYQYPSMTKTLGNFKLHVDEGEYSDSEILVMLGENGMGKTTLVQLLGGKMEPDESKDKVSLRVSMKPQTISPKFPGSVRMLLLKRIKGAFMHPQFNSDVMKPMNLEPIMDQDVQTLSGGELQRVAICLVLGVPADVLLIDEPSAYLDSEQRIVASKVIKKFVMSSKRTAFIVEHDFIMATYLADRVIVFDGQPGKESWARKPEGLLTGMNKFLKSLDITFRRDPTNFRPRINKMDSLKDKEQKGKSC

SEQ ID NO: 3244 - protein, 516 aa, Cryptococcus neoformans
MVLADLGTRLHGAWNQLSKASVIDDKVIDGVLKELCAALLESDVNVKLVASLRTKVKTKKSLEESEKAGGREANKKNVVQKAVFDELVALVDPGTEPYKPVKGKTNVLMAVGIQGAGKTTTCTKLAVHYQRRGFRTCLVCADTFRAGAFDQLKQNATKAKIPFYGSYTETDPVAIASLGVEKFRKERFDVIIVDTSGRHKQESELFEEMVAIGAAVKPDMTLMVLDASIGQAAEGQSRAFKDSADFGAIIVTKLDGHAKGGGAISAVAATKTPIIFLGTGEHLNDLERFAPQPFISKLLGMGDMQGLVEHMQDMARANPDRQKDLAKKLEQGKFTIRDWREQLSNIMNMGSISKIASMIPGLPAGIMDGNEEEASAKLKRLIFITDAMRADELDSDGSIFVSYDKQGNPVGLNKRAKRVAKGSGTSLRELEDLLVQARMMAGMAKQAGDMMGGMGGMPGMGGAGGPGGMDLGNMMRMLGGGGGGGGGGGGMPDMSQMQEMMKHGHGRWRRYGWYAW

SEQ ID NO: 3245 - protein, 562 aa, Cryptococcus neoformans
MQGRLPQMVTDSLRSSSIEGTDTSQGTPQLLSNISACLAVAQTIATTLGPRGMDKLIVDDRGLATISNDGATILKLLDVVHPAARTLVDIARAQDAEVGDGTTSVTLLAAEILKEVRPFIEEGVSPHVIIKGLREAKTLAIQKINEIAVTIDKSDPAEFRDLLMQCAATSMSSKLIHSQTPFFSNMVVDAVLSLDQNDLDESLIGIKKVPGGGMQDSKLIKGVAFKKTFSYAGFEQQPKSFKDPKVLCLNVELELKAEKDNAEVRVNEVSEYQAIVDAEWSIIFRKLEAIVATGAKVVLSKLPIGDLATQYFADRDIFCAGRVADGDLKRVVQAVGGSIQSTCSDIEPHHLGQCGSFEEKQIGGERFNLFEGCPQAKTCTLILRGGAEQFIAEVERSLHDSIMIVKRAIKNNSVVAGGGACEMETSKYLRAHSRTIMGKAQLIVGAVAKALEIIPRQICDNAGLDATDILNKLRMRHAQGETWAGIDVDGEGVQDNMKSFVWEPALVKTNALSSAIDAACLILSVDETVRNPQSEQPQAGPPMPRGAAQQAMRGRGRGMPRR

SEQ ID NO: 3246 - protein, 539 aa, Cryptococcus neoformans
MSFSRILDHHRIPTACHLVPVSECRQHALLIAIFRVARHFQLRLGMRNSEKPRISFDGFKRDDLDKIKRTLQEYFNITLETRDTSLKGWNWGEAQVKGSDLVFQVQGKTAFDVPLSQVANSNIAGKYEVALEFNPPSNYKFDPKDLNKRPPDEMVEMRFYIPGKSMKKAGSDAGSGGEETELDEEGNEVSAADAFHSLIKEKADIGAVVGDSIVVFEDCLILTPRQVLSLAISGRFSIEVYADSIRLVGKSTDHRVPFTSIHRIFLLPKLDDLHVQLVLGLDPPIRQGATRYPFLVAQWPKDEVVNAELNLTDEELAQYPDLEKTYEATTFQVVSRVLKALTGKKVTPPGSLRNAQGLNGIRANVKAVQGELYFLEKGLIFISKQPILIDFSKTDSISFSRVGGGVASARTFDMRVVSKTGGADHVFSAINKQEVGPISSFLQSKNIRLKNEMEEAIVDIDEPFSDDDEEMENESSDGGSPSESDSDDDSGMASDASDPMMEELRKKTQAKRTKAKETSGSGSEDEKPKKKKAKKDDDE

SEQ ID NO: 3247 - protein, 536 aa, Cryptococcus neoformans
MRHVNMQSHTYLLSVYDRVSLPRNQMPYRGFGTIFAWRIVMTLSRLRSRWNAGVHIPGSHLQSYFLLQHELAFNMSLNTRKQERDFTAEVEALQAEAEQLAKNGKLEEAIEKITVLEKQTRNASDMSSTSTLLVLIARLCWEANNLDQLNNQLALMSKKHGQLKEPVVRMVDEAMAWLPALKEQKEQGNFRSGKDRWLELVKTLRDITEGKIFLELQRARLTDKSKAEPVTAKEHLDVAADLLSDLQVETYSTMDKREKTEFILEQMRLESMRGNWVRVRVGSRKINRYSHHSLENIHLTIAQDIKLRYYDLMVQLALQDDEYLEACQAYQEVWDTEEVKNDSAKELSVIENIMIYVVLASYNNEQSDMLHKLYANTALQKAPLHLYVFLDLLKCFVTKELMRWSGIEGIYGPALRQSPIFAPGSTLGKKIGLHKRIIEHNIRVIASYYTRITIQRLTELLDLPLLTTERTLCKLVTDKSVYARIDRPAGIVDFRKKRNVNDVLNAWSGDVSKVLDLVEKTSHLVSKEYAMHGSQG

SEQ ID NO: 3248 - protein, 588 aa, Cryptococcus neoformans
MASTMYQRDPRAVSHSPWDSFMKADNRARAFFWEVPEQVVPKQYKEGSGCNRELELMRWIVMACQTVSNILKSSLGPVGLDKMLVDNVGDVTITNDGATILSLLEVAHPAARVLVSLATQQDKEVGDGTTSVVLLASELLRRANELVRNKIHPTTVITGYRLACKEACRYMAEQLSTKVDKLGKDSLINVAKTSMSSKILGADDDFFAPLAVDAMLAVKTINAKGEKKYPVKAVNVLKAHGKSARESFMVKGYALNCTVASHAMKTRITGAKIACLDMNLAKQRMHLGVHITIDDPDQLEAIRARESEITLERVRKILAAGANVVLTTKGIDDLVLKEFVEAGAMAVRRCRKEDLRRIAKATGATLISSLANLEGDETFEASSLGYAEEVVQERISDDELILVKGTKIVNSSSVILRGANDFMLDEMERSLHDALSIVKRTLESGSVVPGGGAVETALSIYLENFATTLGSREQLAIAEFAAALLTIPKTLSINAAKDSTDLVAKLRAYHNAAQNAPLNDPKRGLMYYGLDLINGEVIDNRQAGVLEPTMSKIKSLKSALEAATSLLRIDDSIQVAPEQKEEVDPHGH

SEQ ID NO: 3249 - protein, 561 aa, Cryptococcus neoformans
MSSIELINPKAESLRRTQALQVNTAGAVGLANVVKSNLGPRGTIKMLVDGSGQIKMTKDGKVLLSEMQIQNPTAAMIARTAVAQDEQCGDGTTSVVLLVGELLKQADRYIQEGVHPRVIGDGFDIAKKEALNFLDTFKQTPKLDRANLISVAHTSLATKLHAKLAQKLSADVVDAVLAIQPPEVTEPGAYREPIDLHMIEVMKMQHKTDTDTQLIRGLVMDHGARHPDMPKRVENAYILTLNVSLEYEKTEVNSGFFYSSAEQREKLVESERRFVDSKLKKIVELKNAVCDVAVGSNEKPKNFVVINQKGIDPMSLDVLAKNGILALRRAKRRNMERLQFACGGVAQNSVEDLTPDVLGWAGLVYEHTLGEEKYTFVEDVKEPKSVTMLIKGPNAHTMTQIQDALRDGFRSIKNAIEDNSVIPGAGAFELACSAHLNSSLKTLAKGRAKLGVQAFAEAMLVIPKTLAANGGYDVQDAIVGLQQELEEAGEDGVVGLDLKSGEPMDPVVEGVWDNYRVKRQMLHGAATIAVNLLNVDEVLRAGRSSGCIVLRYIPLSLTIRM

SEQ ID NO: 3250 - protein, 619 aa, Cryptococcus neoformans
MAATDKPQKPAYVPPHLRNRAAPPAAVPPAAPAAYRPSPTGLPTPATTPPTRHIVPAAVAEDDVGGWGAQPRVRKTFEHGAPPGFGSWKNGQHVVGARNTRMEKEMYGEVGDGLHQATGINFDKYADIPVEVSGKGVPEPVTEFTNPPINPVLLENVKYARYATPTPVQKYSIPIVADGRDLMACAQTGSGKTGGFLFPILSALFTYGPSTPPVEQDTGYGYRRTKKVYPTALVLAPTRELVSQIHEEARKFAYRSWVRPAVVYGGADIGSQMRALDRGCDLLSATPGRLVDLIERGKISLANVKYLVLDEADRMLDMGFEPQIRRIVDEEDMPGVLERQTLMFSATFPREIQNLARSFLKEYIFLTVGRVGSTSENITQRVEYVDDQDKRSLLLDLLLAEQSGGLILVFVETKRMADTLCDFLCSRRHNATSIHGDRTQREREAALYAFKSGRAPILVATAVAARGLDIPNVTHVILYDLPNDVAEYTHRIGRTGRAGNVGTSTAFFNRGNTNIGKDLIELLKEANQEVPQWLVEISSERSYGGGGGGGYKGSRGRSTGGGGGARLGGRDMRQGGGGYGGGGRTSGYGGGYGGGGGGAGWGSGGGFPPAGGDSGASWW

SEQ ID NO: 3251 - protein, 557 aa, Cryptococcus neoformans
MPRPSFGSRQFIATATRISSRKMTTQPRYTVPLKEPHPDNHSLHTESTTTIFLPNEGAFLNPVQHYNRDMSVAVIRAWNEMRKEELEENKFRAPSINILEALAATGLRSIRYAKEIPNVKYVLANDLSPSACEAMRRNVEFNGCRGRVKINEGDACAFMYNHRSAVGPSARVDVVDLDPYGTAAPFLDAAIGCISDGGLLAITCTDLAVLAGQQYPEKCYSNYGGTNVHAEYTHEAALRLVMHSLASVAARYGRYITPLLSFSIDFYVRLFVRIDTRPEQVKHLASQTGVVFTCQYCQTAVNQPFGKVISKETAKGKEMTAFKTVAGPTAGNGSACEECGGTMHLGGPLWLGPLQDNEFAKRVIKEIESTEKEYKTYNRMLGMLTLASQELPHPWFFTANRIAKSVHAPSLPMNKILSALLNAGYKISRSHCSPGAVKTDAPRSFIYDIMREEAKENPVRMDKIAEGSPARKILAKPITHTIDFTPHPDASLERQGKETFYQVNPLPNWGPAPRAKSLGEKRKAEVDAENGEGDAVVGGEGVKRIKVVVEEEEMMNA

SEQ ID NO: 3252 - protein, 606 aa, Cryptococcus neoformans
MPPDTITISSLTLHLPHGLGPSAFHLTPSPPCPALLSLTIHLVPNSVSATAAGDSMAGLGVNYSSVSKAVYALANDAEKVWSGPWELMRAVSAIPLGFDDVQSVDIRLGLPKALLHALEAVYKASYAKNGEETGRSCTIRDLKVVCIVGLHEHERKEKQRLELDVKVRGGDWNVWGHKGFADEIYDFVSNSAYGTIESLNHELGQHLLKSRYLGDPTQSHLEITIRKPSAIPFATPSITIHRSQADYAPSLPSGTACNAPREALERVFVAVGSNIGDRVANITRAVSLLEEAGCKLLGTSRLYESEPMYVEDQDRFINGVIEVSYCGPTPLEPLEVLRLLKHIEKAVGRTKTFTNGPRVIDLDLVFYGHRVVKIGNETDEEDEHGIKWLECPHKRLREREFVLRPLADIDPEFTHPALRRSVGQLLASLPTTFPPSLSPIIPLHSHASPLRLSIPASPYIMAIFNTTPDSFSDGDPARTNVEYALAACEKLLKGPEPPAILDIGGMSTRPGSEPCSEEDELSRVIPLVKAIRSSSDPIVASIPISIDTYRPSVAKAAVEAGASIINDVRGGQEPGMLRVMAEADVPVVLMHSRGDSKTMCSGCPGL

SEQ ID NO: 3253 - protein, 607 aa, Cryptococcus neoformans
  MISC_FEATURE (190)..(190): Xaa = any amino acid
MLTTAAGARLFSTTIPKRADVTLTIDGKEVSVPAGTALIQACEKAGATVPRFCYHDRLAIAGNCRMCLVEVERSPKPVASCAMPVMPGSKVFTNTPLVHKAREGVMEFLLANHPLDCPICDQGGECDLQDQSMRYGSDRGRFHEITGKRAVENKDLGPIVKTSMNRCIQCTRCVRFANDVAGVEDFGTTXAEETISKLACTLRRLWILKCPVTLSTFVPSAPTSKPYAFQARPWELKKTESVDVLDAVGANIRIDSRGIEVMRIQPKINDEINEEWISDKTRYAYDGLKYQRLTTPLVREGNRFVPAGWEQALETIRHGLINSGAKGDEIKAVAGHLADTEALVALKDLMNRLGSENLALDQKLGDLPSVANVDIRSNYLFNTGIENVEDADAVLFIGTNPRHEAATINSRFRKSFLYRGADFAVIGEKFDSIFEYDHLGTSAKDVAAFFGGKDAGSFSKMWKDAKKPLIVVGSAVLETKDGAAVLAEVSKHVLANSDKFLTPEWTGYSVLQRVSLLFKSTSNAKAREKKLTNLRLFPEPLPMTLVSPLPPLLPLQSLNSSTSLMPTRSTLLLSLKTRSLSTKATTVTLVLNSPMSACQLPLTQRRV

SEQ ID NO: 3254 - protein, 597 aa, Cryptococcus neoformans
MARGVGGRSRQPRLFARSARRWWSSDILGKKHHNLPTSSYPFISRTLKNRMSLKVPKASGPDLFKSGYKHLSGLEEAVLRNIAAVGELSEIVRTSFGPNGRNKLIINHLGRLFVTSDAATIIREIEVAHPAAKLLVMASTAQEAEMGDATNLVLIFAGELLKRSEHLLTMGLHPSDVIQGYEMALAKGREELETLVAAQITSSPLPTVDNLAAAVSSSLASKQPGCEVLLSKLVAEAALAVMPKNPKDFNVDSVRVVKVLGGGLEASRVVRGMVFGREPEGIVKNATRAKVAVYTCGLDISQTETKGTVLLKKAEDLLNFSRGEEKQLEGYFKEIADSGVKLIIAGSGIGDLALHYLNRMGIAVIKVLSKFDLRRLCRVVGATPLARLGAPTPEEAGMVDVFETIEIGGDRVTVLRQEEGEKTRTATIVLRGATANYLDDLERSLDDGINTIRILFRDGRLVPGAGASEIELARRISAYGGKTAGLAQHSIKRWAEACEVVPRTLAENAGLNSEDVVSSLYKAHADGQVDAGVDIESEKEGVRSTKDMGVFDPYAAKDWALKLATEAAISVLRVDSIIVAKQAGIAPPKQQGHWDDD

SEQ ID NO: 3255 - protein, 615 aa, Cryptococcus neoformans
MSDCYKDPRVEVHIGDGFKFLPEHKNEYDVIITDSSDPVGPAEALFQPPYFQLLKEALKEGGSVSTQAECLWIHLPLIKTLKETCSKLFPVVKYGFTTIPTYPAGQIGIMVCTKDSTRDLTVPLRAVPDTRYYNSEVHRAAFTIPEFGRAMLEDGVNVLPKFSGARPTTTKKKVLLLGSGLVAGPAANYIARHNHELTIACRTLASAEELASGLPNATPMSVDVSSADALRQAIKGHDVVVSLIPYTHHAQVMEAALEEKVHVVTTSYVNPQMRALEQKFKDAGLICFNEIGVDPGVDHLWAVKVFDEVKKAGGKIKSFYSFCGGLVEPAAADNALGYKFSWSPVGVLMALNNDGKYLKDGKVVEVAGKDLMSTAKPYYFTPAYNLVAYPNRDSTVFREFYGLEGVQNLCRGTMRYAGFCEVITAWKEIGLMSDAQVDYLAQGAAPITWIKVISQLLGVEAKEAAIIEKLKTLKSFETESRVLISKFRDLGLFSEEQVAQRGSVMRALSALLEEKCAFKEGEVDLVLLQHTFEIINADGSEQTITSSLEAYGDRNGGPSAMAKLVGVPCGMAVQFILEGVLNKPGVFAPYDEETCKLFRERLEKEEGITMVEKLV

SEQ ID NO: 3256 - protein, 563 aa, Cryptococcus neoformans
MSADNAPVNAANPEVAPVQSSADAPTQEGAPAPAGPSKSELKKRAKEAEKAKKAAERAAREEEDRKKREAKESEDHAKQNYGKLPLHQSQERNGESCQKRLKFHELNKDLVGQRVIFRARLHNMRAKIVFLTFRQQTHTLQGVLVVSKESDEHQVSKQMLKYATLIPSEAIVLVEGVVKEAEVKSCTIQNYEVGIQKIFTAVEVNELPFSIDDAARPESDFQRDVQFARVALPTRLDNRVMDLRTPTNQAIFRIQSAICQLFREYLNSEGFIEIHSPKLQGAATESGASVFKVKYFDREAFLAQSPQLAKQMAIAGDMERVYEIAPVFRAEDSNTHRHMTEFMGLDLEMAIEEHYHEAVDVLDNMLLHIFRGLQTKFKHEIETVKKQFPCEDFLFLEKTLRLPFKEGMRMLREAGATDGEGKPIGELDDMSTENEKLLGRLVREKYNTDYFILDKFPIAIRPFYTMPDPSDPTLSNSYDFFMRGEEILSGAQRIHDPTFLVERMKDVGIDPASMAGYLDAFKLGAPPHAGGGIGLERVVMLFLKLGNIRRASLFPRDPKRLAP

SEQ ID NO: 3257 - protein, 601 aa, Cryptococcus neoformans
MIPRRHHFKPAPQPTVQVLQPPDEDAPSLTITMLGAGQEVGRSCCVIEHRGKKIVCDAGLHPAQPGIGALPFIDELDWSTVDAMLITHFHVDHAAALPYIMEKTNFKDGNGKVYMTHATKAIYGLTMMDTVRLNDQNPDTSGRLYDEADVQSSWQSTIAVDYHQDIVIAGGLRFTPYHAGHVLGASMFLIEIAGLKILYTGDYSREEDRHLVMAEIPPVKPDVMICESTFGVHTLPDRKEKEEQFTTLVANIVRRGGRCLMPIPSFGNGQELALLLDEYWNDHPELQNIPVYFASSLFQRGMRVYKTYVHTMNANIRSRFARRDNPFDFRFVKWLKDPQKLRENKGPCVIMSSPQFMSFGLSRDLLEEWAPDSKNGVIVTGYSIEGTMARTLLSEPDHIESLKGGNVPRRLTVKEISFGAHVDYAQNSKFIQEIGAQHVVLVHGEASQMGRLRAALRDTYAAKGQEINIHTPKNCEPLTLTFRQERMVKVSILFPLPFETLPPSSDNSLITQILRQAIGSLAATRPEHGTSVKGLLVSKDFSYTLLSPADLHDFTGLSTSTIIQKQGVAISVDWAVVRWYLEGMYGEVGKVLRKRGKLLLL

SEQ ID NO: 3258 - protein, 597 aa, Cryptococcus neoformans
MFQKKPRKVEKVLEILINYSRGIYEIVKHRRNAAVQKRGFASKDVVFGNDARQGMLKGVDVLAKAVAATLGPKGRTVIIGQSFGGPKITKDGVSVAKAITLKDPVENLGARLVQDVASKTNDTAGDGTTTATVLARAIYSEGVKNVAAGCNPMDLRRGAQKAVDKVLEVLAANKKVITTSEEIAQVATISANGDTHVGAIIAQAMEQVGKEGVITVKEGRTIDDEIEITEGMRFDRGFISPYLITDTKNQRVELEKPFILLSEKKISALQDILPSLEIAAQTRRPLLIIAEDIDGEALAAVILNKLRGQLSVAAVKAPGFGDNRKSILGDIAILTGGTVFTDELDVKLEKATPDMFGTTGSVTITKEDTIILNGEGDKSLIQSRCEQIRALINDSSTSDYDRTKLQERLAKLGGGVAVIKVGGSSEVEVGEKKDRYDDALNATRAAVEEGIVPGGGTALLKASTALEDIAVDNFDQKLGISMIRQAIRRPVRTIVENAGEEGSVVVGRLLSEEFAAPEKFNWGYDAQTSQYRDMIAAGILDPLKVVRTALVDASGVASLLTTSEACVVDAEEKTPPSGMGMGGMGGMGGMRYDVRRV

SEQ ID NO: 3259 - protein, 619 aa, Cryptococcus neoformans
MAFSGALTEIHIDSNNNYYEVSTYPSVGHDDDIGNSKKALEKAEINLNDCLACSGCITSTESLLITMQSQNEILEFIKTNPTVVDPESPCHKPRLPILSISPQTLASLSAAYATASSRPPIPLLVLLRRIRAFLSQPEKGSWRVWDTTFARHMSLRESVVEFHERKDKKEKGKAAEMPMLASACPGWVCYAEKAQGDMLPLLSAARSSQGIIGALAKSWYGHKLQHKPDEIYHVTAMPCYDKKLEASRSDFYSSLYSTRDVDCVLTTGELDLLLQELGFDPHVPIANESTPSYSATEDSPFPELLTHEGSSSGSYLQTIIHDVQRSHPNPTRIITREIRGSTDNIEYLIQDTITGQVVFKGAKVYGFRNLQNLVRKVAKETGIGRSGRGAGAGKLSAAVAARRRKAKTAAPAATSATTSAEGTDVESIASLSLVSGEDKKLDFVEVMACPGGCVNGGGQMKPTVPTPSAPEAMEVDEEGYQRPLPDDGVAVAVNGGSNNVGTGTVAGMEEGMRWSTKEWVAKVEDIYWTGLPTPPASPPLTASNVNGFAPQVKTNGTTNGQVNNGVDRNLQSDQLAEEIIHEVCGDDASKRWDFMRTRFRKVESDVLSSGGVTHEAVKW

SEQ ID NO: 3260 - protein, 613 aa, Cryptococcus neoformans
MLRAVIRTATSTRQATTYAPKFKPQIPLRRTFIMSAPAAEANLHKDEVTGEMISKSELKRRQKERQRAAQKAEKAAAAPAAAQPKKQSKADAEAEMDATAFHEMRYKEIAKLRETKQPNPYPHKFNVTHAVPKFVEEWGKEGKLEKGETAQLNEPVSISLAGRVYTIRESSSKLRFYDLKADGVKVQIMAQAQNAASLEEYLDTHDRIRRGDIIGVTGIPSRTKMGELSLSISSIQLLSPCLHLLPGREGVVDLETRYRKRYLDLIMNPSTRDIFVTRSKVINYIRKYLDAQGFLEVETPMMSMIAGGATAKPFVTHHNDLKLDLFMRIAPELYLKELVVGGLDRVFEIGRVFRNEQIDMTHNPEFSICEFYMAYADMYDIMDMTEELIEGMVKSLTGGTKLTFHPQGKGEGKKVYEVDFARPWKRFDMIGELEKQLNVKFPPGETLHDDNTNKFLRELCEKHNVDCAEPKTNSRLLDKLVGEYIENQCVNPSFIVGHPQVMSPLAKYDRSRPGLCERFEAFLCTKEICNAYTELNDPFDQRERFMEQVRQKEQGDEEAQGVDETFLDALEYGLPPTGGWGLGIDRLVMFLTDCSNIKEVLLFPAMRPRCQLC

SEQ ID NO: 3261 - protein, 597 aa, Cryptococcus neoformans
MLFCTYKNSSLHCICTLSPLSTMGNVSTTAPPFLHALSIISDLKLPQCTTNSIFSSSNPAQPSASGTSLFGNTSSQPASGSGLFGSSSTTNNSSATPAASGGGLFGGGAQTSGGLFGNNTTGAATGTSTGGGLFGAKPAEGTGAPGAASTTGGFTGFGAKPAGTTSAPATGGLFGSKPAESTPAASSSPAPSSGGGLFSFGAKPASTTTPAAPSLFGSAPAKDASSSTPTSGTPPTTSGGGPFGGGGLFGAKPAAPATEAPKADTATTAPAAPTSGLFGGVGASKPAEAPKPAAGGFSFGNLGAKPATPSTTEAPKTGGFSFGASAPSADKKDEMPAEAPKTGGFSFGAPAAAASNEEKKTDKPAEAPKPGGFSFGNIGTSATTASGDDKGKAPEAPKAGGFSFGGLGAKTDGDKDKAPAAPTPAAPAAGGLFGAKPADAGQSSTAAPSASGGLFGANPNTTAAASTTTPAVPTAPIASAPANVEKPSEPVPNLLRGKALDDIVEGWNKDLEEQVKEFERQAGEVREWDKILVRNGNQITALRRQVLEAQQTQAAVDEPLNYFEAQQNQLESMLDVYEKECKNVKRQHQAVGGENAG

SEQ ID NO: 3262 - protein, 586 aa, Cryptococcus neoformans
MAFLSTPLPSSDYKMPRSTYTEALLGPEVYKKVRETKVLVVGAGGIGCELLKNLVLVGFANIEIIDLDTIDLSNLNRQFLFRKPDISKSKALVAAATAHHFNPNSGININARHGNVKDSVNDLEWIKGFGLVMNALDNMDARRHVNRLCQAAGVPLIESGTAGYLGQVTPMIKDVTECFDCVPKPAPKAFPVCTIRSTPSEPIHCIVWAKTYLFGKLFGEDDEDMDTEELDKAKSSGENAEEIENLKKEAAAFRQVRKSLSEEDGPRRVFHKIFNEDIRRLLAMEDMWKKEGRVKPVPLDCDAILDETDRAAERDKGKSAALLKDQKELNLKENLELFLDSCKRLSARALAFPDTPLSFDKDDDDTLDFVLATANLRATAYGIPNKTREKKSILIPAIEMAGNIIPAIATTNAIIAGLIVMQSLNILSRIHSTSNGGPSTDSSSIPVRNVFLRTDPTKPLGSFLPQHPDPTCSVCRDVYIPFKADVGKCTLGEFVEDAVKDWLGSAEFEGQGEGEDVEWTVFEGGRLLADPDFDDNLGRTLDDLGVGRGKILTVRDEYKVQTCTLLCLPTVGLKYILSCLPKRLDH

SEQ ID NO: 3263 - protein, 621 aa, Cryptococcus neoformans
  MISC_FEATURE (418)..(418): Xaa = any amino acid
MQYGSQSPTLGREPLLASAQNPGMSQRLSESSFTSYDNQSSMSHRVGANSPTGASYASFSSGNRFGPTAHLNPGPVAGVSEAGALPAGSYAQGPIDDDDDMDDHLHTFTAAEKKDLSTPFNISSWRGWANALTLAVLAGGGVMLFAGYPIISFYYGDNSSSGSNTSGYNLGGINASGQYPSITGLPSLIDPDTPEYLYTRTGFDGNEWTLVFSDEFEKDGRTFFEGDDPFWTGVNFNYWPTGDLEWYDPSAITTADGNLLITITQEPINDLNFKSGMLQSWNKFCFNKNAYIEFSASLPGTSGIGGFWPGVWTMGNLGRPGYGASTEGMWPYTYNSCDVGILANQTWLNGTGPEAALTSGSNGGQLSQLPGMRTPSCTCEGEDHPGPAVTVGRSAPEIDIIEAQIIISENRGEVSQSXQTAPFDDSYQWDNTSSSHYKQYDTDLTYWNTYLGGTYQQSVSSLTRVPRDIYYSQPGGGGEFAMFGMEYDSAPGHKEDGYVTWYSDNKTSWTMYADALAANEKAGIGRRTIPEEPMTLIVNLGLSFNFQPVDFDHLTFPNYLRIDYFRVYQQSDSISIGCDPDDYPTADYISKHAEVYSNANLTTWAQAGNTFPKNELTGCNR

SEQ ID NO: 3264 - protein, 597 aa, Cryptococcus neoformans
MVNETRRRSAVKVWEEKELRCDWDEEISHAEQHISFSGNTVLITYILGSPPRLAGVGWLARRDAISFLHGYSLLHFISTSIQSVTAMANQPEKLADAQNKDAGEKVQETEEKTVVEAVPTVEEGMSILNNIALIGRAVTTIEPRFTIRVLRTLTSLRKKLTKNALKTVLDDAFPKGTTAPTPKKKFVPPIYSATGDLLPEGIVYLRLLLILANLDAGRVVEVDFAMETADLISSWNRRTMDQLAGKIWFYVARAYELQGRLAELQPQFMAIRQTAALRKDETLEVTVLNLLLRSYLANSQYEQAEKLVSKTQFHGAANQAQTVRWLFYTGRLRAIQLNYAEARNYLQTAIRRAPKDEVAPGFVQLIHKYFIIVVLLTGVIPDRALFRKPVLKQALAPYFQIVQAVRIGDVAGFQKAFQTHEATFFADSTHFLISRLRHFVIKTALRTITLAYSRISLADVCIKLHLDSEEDTEYIVAKAIKDGVIDATIDPQGGWMQSKVAKDLYETDEPAKQFQKRVQYCTQVYNESVRAMRYPPDAHRKELDSAAESRERDREIAQLIQESDEPDDMDHGRFVERKDGNRTIAQTALLCEGFSMN

SEQ ID NO: 3265 - protein, 670 aa, Cryptococcus neoformans
MAGYLVRSAPSCPDLSPFPYLAYGTHRINIITHTTIFPRPPLYISEKLKTFLHTYKTKTVNHTSTNNPHFPNMDALLAAAGPLPQKKGRPGKVHQRTPHPTSHKTVARGDGKDNIDSSTQSILSSTRLPHSFHRSNLATGSSSAPIRPDGTLGRIGDKKLRAKIASQDVGNKRAKVERDDVNEWINKAIGGERGGIEVDEDLGEKTWRVKQEEIVKEVAMNVRGKKFDLKMEDMGSYKVDYTRNGRHLAIASSRGHVATFDWQAGKLHSEIHLKETVRDIKFLHSEAYYAVAQKKYVFIYDQNGVELHKLKQHIDPTHMEFLPFHYLLSTVGNAGYLKYHDTSTGVMLTQIPTRLGSPHSMTQNPHSAIIHLGHANGTMTLWSPNMTTPHVKLLAHRGPVNGVAVDPSEHSAGRYVATSGMDGTVKLWDGRMWGKEVREWKTRNQITSLAFSGMGMLSVGGKSGVTVYQDLYKNTHRPPSPYLTLPLPSLTASATRFCPFDDLLCVGHERGISSLIVPGSGEPNFDSAEADLFETRTRRREREVRGVLEKVRPELITMDANFLGKISEGRGGETHEEREGRSFRQLGRLERLRLTGKADEPEQEGVDDEDAGLEDGEADPNGGERSIREKKERRKMKGKGGSTKRYLRKKAKKNIVDNSLVSLPKFLVRS

SEQ ID NO: 3266 - protein, 642 aa, Cryptococcus neoformans
MSSVAGLQRITPVPTSADFIDVVLNATMRKTPTVIHKNFKISRIRNFYMRKVKFTQDTFDEKLGKIISEFPVLDNLHPFLSSLLNVLYDKNHYKLALGQINTARHLISQVAKDYVRLLKFGDSLYRCKQLKKAALGRMATIMRRQKDPLAYLEQVRQHISRLPAIDPNTRTLLICGYPNVGKSSFVNKVTRADVDVQPYAFTTKSLFVGHMDYKYLRWQVIDTPGVLDHPLEEMNTIEMQSITALAHLRSAVLYFMDLSEQCGYTIEAQCKLFQSIKPLFQNKPTILVINKIDIVRLADLSEENRSYVDTILADKSVTVVEASTYTEEGIMNVRNTACDALLAHRVEQKLQGSRIEMVANKIHVAIPQKRDDVERKPFIPDTVAHKVKYDKDDPSRPKTERDMEQELDHSGMGVYSVDMKSDYMLADDSWKYDVIPEFLNGKNVADFIDPDILEKLDALEREEEALEAQGFYASDEEEMLDSEEEEFRDAARQIRAKKAAIKKISQEKNTLQNRPIIPKNKKKLYLSDLTSNMRKAGHDPRELEKRAARLAKENDKINAERKKAMAAQQAAEEEAGGMDVDMDEGDGSSKNKKREKANELRMFAQRLPNRLAKASESDRHVPITRPKWMLSGKRKGGTTDRR

SEQ ID NO: 3267 - protein, 658 aa, Cryptococcus neoformans
MVSNYYVVVQSLRWPPDIHVHPTWRPRGRSGHHTTPIAVYDRHTGERAGQRCHGSGRSVIRYLFTLSFLPSSIPTLLLSQLLVLLQQWTASQLLVRTQLRARTQCSRPAEYQAWKKLQSLHASKADKLVLKDLFKADPKRFSNLSKTFSSSSPNVSLLLDYSKNLVDDEVLSTLFDLAREAKVETFRDEMFAGKHINTSEDRSVLHIALRNPPADKGGFKISEAGVDEVHAVLAHMKEFSDSVRSGAWKGYTGKAIDTIVNIGIGGSDLGPVMVCEALKHYSKRDLKTHFVSNIDGTDMAEVLKACNRETTLFIVASKTFTTQETITNAESAKEWFLEQAKEKAHVAKHFVALSTNTKGVTEFGIAESNMFQFWDWVGGRYSLWSAIGLSICLSIGFDNFQELLNGAHEMDKHFKTAKLEDNLPVILALVGIWYNDFYGAQTQALLPYDQYLKKFADYFQQGDMESNGKSVTKDGSRVDYETGPIIWGQSGTNGQHAFYQLIHQGTKLIPCDFLAPVETLNPISGGKHHEILLSNFFAQPEALAFGKTEEEVIKELGPEQSKNSALVKSKIFEGNKPTNSIMFQKLTPGTLGALIALYEHKIHVQGAIWGINSYDQMGVELGKVLAKAILKQLGSENDVQGHDSSTTGLIHFYQKNRK

SEQ ID NO: 3268 - protein, 682 aa, Cryptococcus neoformans
MVLRSTLIALVTLLSLSSAAAFYLPGSAPRDYLEGEKIDVFVNTLTPMLNSKLKSLISYDYYDSRFHFCSPEGGAKRQPESLGSILFGDRILSSPYEIRMLENSTCQKLCQASVPKDDAAFINQRIKEDYGLNLLIDGLPSSEMRRDSKTGETFLDAQGFSLGNDEMNPDKPALNNHYDIYIQYHMRDENHFRVVGVLVYPSTVNSMVAGSTEPDCFNKQPFYLSEENSNEFFYTYSVSFLESDIPWGLRWDAYLHVFDPRIHWFSLINSLIIAGFLVFMVGMILLRSISRDIHRYNAVDLSDEVQEDYGWKLVHGEVFRLPQRPMLLSVMVGNGIHLIMMCIVTLVFALFGFLSPSNRGSLATVLLICWTLFGCVSGYSSARTYTTLGGEQWKTNLILTAVLFPTVVFTIIGMLNFFLIFASASGAVPFGTILAVLFLWFLISAPLSIGGYFYGMKHGAFINPVRVASIPRQIPPKPWYLSTWPAAILGGILPFGAAFVELYFVLSSLFGNRAYYAFGFLFLTFVIVALTTATVTVLFVYFLLCAEEYRWHWRAFLIGGGSAFWLFAYGVWYWVSRLYLNGFTSVVLYFGYLFLVSLLDFLVGGSIGYVATYFMLRRLYTSIRVDKRFKGSYVLARSESRAVNNCRNEGIGRRKICEQGDLPQSLRLNDYCPKLRVIVLQK

SEQ ID NO: 3269 - protein, 677 aa, Cryptococcus neoformans
MGRTTRRSARPQSGTSTPPNISSPPSRPLFPSISLRSSSPTPPTHENLSARSSLLSVLTRPAHSVAATPDSPEEELSDLSTVSSYASSVISGTHSKDMTEEEIAKVYENYLEKPFIQIKTTIKHSEFGHCNNPNWRWTSQVSTAERVARLWNPNEVIHADDARPSYTVLLSTYLSYILLIIIGHIRDFFGKKFTPASYAHLMPQNGYAALNSDFDSFYTRRLKKRLDDCFARPTTGVPGRTIVCYDRSSTDQNNTFQLTGTTTRALNVSSYNYLGFASSTGGCADAVEMAIKRYGVASAGARHEASTTDLHLQCEKLVAKFLGVEASMVVSMGYATNSTTIPALVGKGCLVISDEFNHASIRAGVRMSGASMRWYKHNNMDVLENLLREVISQGQPRTHRPWKKILVIVEGLFSMEGSLVDLPRLIELKKRYKFYLYVDEAHSIGAMGPNGRGVCDYFGIDPREVDVLMGTVTKSFGAAGGYIAGSKELVDRLRVRSHATAYAESVSPAVLTQIIASMVYGPAPSSLLPPWLTLPPHLLNGTEGRERLRRIAFNSRYLASGLRKLGFIVYGNRDSPIIPLLIFQPGKMGYFSRMMLERIGPDKTPIVVVVVAYPATPLITSRVRFCLSASHTKNDMDMVLRACDEVGDVLNLKYNKQEMSVEEVIANAEELVAASHV

SEQ ID NO: 3270 - protein, 554 aa, Cryptococcus neoformans
  MISC_FEATURE (218)..(218): Xaa = any amino acid
  MISC_FEATURE (333)..(333): Xaa = any amino acid
MSFYSKRRNGNGRPFIIVREQGRKVRTHGLEAIRSHILAARSVTNIIKTSLGPRGLDKILISPDGEITVTNDGATILGQMEVEHQIAKLLVEVSKSQDDEIGDGTTGVVVLAGALLSSALSLLDRGIHPIRIADGYEKACEIAVAELDRVADTVSFTSCDLIDDVSNLMKTAKTSLGSKIVSIAHDKFASIAVEAVLSVADLERRDVDFELIKVDGRXGGSLEDTSLVKGVVIDKDMSHPQMPSVVRDAKIAILTCPFEPPRPKTKHKLDIESVEEYKKLREYEKEKFLDMIKKVKDTGANLVICQWGFDDEANHLLMQNELPAVRWVGGPEXRLIAIATNGRIVPRFEDLTADKLGHAGVVRELTFGTTRDKMLVIEECANSRAVTVFVRGSNKMIIDEAKRALHDAICVARNLVRDNRVVYGGGAAEICASVAVSKRADEIPTIEQYAMRAFANALDAIPLALAENSGLSPIDTLADVKSRQVTEGNPRLGIDCLGRAENDMKKQHVYDPLISKRQQFLLATQVVRMILRVDDVICLCIWGRVGSDTDTMYA

SEQ ID NO: 3271 - protein, 651 aa, Cryptococcus neoformans
MYLEIFLALQKLRVLRMKLCVNSDSRTLLATSLPTRSLSEFASLLSDHLLIHGNDSADFSFSQPPFSTLIDSRVLVALADQKFAHPTLVQAKAIPLLLEGKDVLARARTGSGKTAAYIVPAVQKILEAKAYQATRAIILVPTKELALQVSSFTKNVTKYCDGLVQCVDVAAGGASIQRVLLNDKPDIVISTPTKLLSLLQSKSLSLSQLSFLAIDEADLLLSYGFKDDLTRIMDPTSGWIPKLGVQGCLMSATLSDDVEGIKGLVLRNPAILTLSEPASASSLLSQHYTHTSERDKFLLIYVLLKLKLIRGKSIIFVNDVERGYRVKLFLEQFGVKCCVVNSELPLASRYHVVEEFNRGVYDVVVATDEDEDDDKEAEDKEKEAKEEAKPAPGPSKRRATSPPSKPNKRARRADPTSSLARGIDFTSASSVINFDLPLTSTSYMHRVGRTARAGQSGLALSFVVPRENWGKDKAVSIKSAEKDEKVFERIKERVKKESDSEIKEWDWKGRKGEIEGFRYRMEDALKAVTGKRVAEARREEVRRELLNSEKLKSHFAANPLDLSYLRHDAPLHPARQQTHLKHVPNYLMPKIAALPTGGDVTDHAGVGFSRRGRGGHRGRGGRGSKSGRGKKVDPLKQVVVLVFFKTRHVCI

SEQ ID NO: 3272 - protein, 611 aa, Cryptococcus neoformans
MGKITIGIDLGTTYSCVAVWQNDRVEIIANDQGNRTTPSYVAFNDSERLIGDAAKNQVAMNPYNTVFDAKRLIGRKFNDAEVQADMKHWPFKVVEKGGKPVIKVEYKGEEKTFTPEEISSMVLTKMKETAEAYLGGTVSKAVVTVPAYFNDSQRQATKDAGAIAGLDVLRIINEPTAAAIAYGLDKKSEGEKNVLIFDLGGGTFDVSLLTIEEGIFEVKATAGDTHLGGEDFDNRLVNHFVQEFKRKNKKDLSSNARALRRLRTACERAKRTLSSAAQTTIEIDSLFDGIDFYTSITRARFEELCQDLFRSTMDPVEKVLRDSKIDKSSVNEIVLVGGSTRIPKIQKLVSDMFSGREPNRSINPDEAVAYGAAVQAAILTGDTSEATQDLLLLDVAPLSMGIETAGGIMTPLIKRNTTVPTKKSEVFSTYSDNQPGVLIQVFEGERAKTKDCNLLGKFELSGIPPAPRGVPQIEVSFDIDANGILNVNAADKSTGKTSKITITNDKGRLSKEEIERMLAEAERFKAEDEAAAATVQAKNGLESYAYSLKTTLSDNKDKFDSADHETLSKKVEEVINALDTMQSASKEEFESLQKELEGIANPIMTVSVPNF

SEQ ID NO: 3273 - protein, 678 aa, Cryptococcus neoformans
MFIRSILARVLRLSHSFFHLKNSFLLIKMAPSASKQKRLAEKAAKAASKTGSSKSSVTGASTPLTSVSDDPTDAAEQMKKLNLATDRSAVCRMLFSGGVLVSDPKGRDIKIDQYMLSFHGRLLIEGAEIALNYGQRYGLLGENGSGKSTFLQSIADRDIEIPDHIDIYLVSGAVDPSDVNALDYIVSSAREKVERLEKLAEDMSTADDVDELALDAIYEELEEMDPSTFEAKAGAILNGLGFSQQMMAKPTKDMSGGWRMRVALARALFIKPHVLLLDEPTSHLDLGAVVWLEAYLSTYNHILILTSHSADFMDTVCTNIMDLTTKKKLVYYGGNYTTYVRTKSENEVNQMKAYAKQQEEIAHIKKFIASAGTYANLVKQAKSKQKIIDKMEAAGLIEKVEQPRQLRFNFEDVKKLPPPIIAFSDVAFSYSGKKEDYLYQDLSFGIDMDSRIAIVGDNGTGKSTLLNLITGALQPVEGTINKHTQLKLAKYSQHSADQLPYDKSPVEHIASLYSEKFPDKDIQFWRQQIGRFGITGAHQTSPINQLSDGLRNRVVFAILAMEHPHIILLDEPTNHLDMASIDALAAAIKEFEGGVVIVSHDFRLISQVAEDLWEVKDKKVINLTKQDISIVDYKKALAKRYVPFSMQPNQPSINNTLTGQAQIEKARLISKSATKGVA

SEQ ID NO: 3274 - protein, 641 aa, Cryptococcus neoformans
MGLRTVKGARGAENLPFQVERLRARAVGCIVGVKRVGGQAQVTKFLSLFTARGERYIAAAAVMSGARRGMMLAERMTWNYYHQTRSLHRPVQGRCLLFTDTGPERQSGRKAQTANIVAAKTVADVIRTCLGPKAMLKMILDPMGGILLTNDGHAILREIDVAHPAAKSMIELSRTQDEEVGDGTTSVIILAGEILAYSLPLLERHIHPVVIIRAFKAALNDALETIQRVSIPVDITSETEMLALIKTSIGTKFSSRWSDLMCKLALEAVRTVAVTAEAENGLVGSGEGGDKVNIKTVDLKRYARVEKVPGGEIEDSRVLSGVMINKDVTHPKMRRRIDNPRVILLDCPLEYKKGESQTNIEISKEEDWNRVLQIEEEQIKAMCGKIIEFKPDLVFTEKDLAQHYLLKANITALRRVRKSDNNRIARAVGATIVNRVEDLRESDVGTQCGLFHIEKMGDEYFTFLDQCQNPKACTILLRGPSKDILNEIDRNLADAMSVARNVVFNPTLTPGGGAIEMAISVSLGEKAKLLPGVAGAPYKAIADALEVIPRTLVQNCGGNAIRTLTELRAKHAEGQHLYGVDGETGKVTNMKEYGLLESASVKIQTLKTAIESATLLLRVDDIVSARRPGERWCRCRSADNG

SEQ ID NO: 3275 - protein, 671 aa, Cryptococcus neoformans
  MISC_FEATURE (483)..(483): Xaa = any amino acid
MGKTEVAPGVHHVHPLPDSVPESEDLFAPPPRMQGKEGRPKPHLGPNYEAYVNEWAKTVGPNNDEWWAAKARETLDWYEDFKTVRAGGFEHGDIQWFPEGTLNAAYNCLDRHFYKNPKKTAIIYEADEPSESREISYEELMQETCRVANVLKSYGVKKGDAVSIYLPMTWQAAAAFLACARIGAIHSAVFAGFSAESLRDRVNDCECKVLITTDEGRRGGKSIATKQIVDAALQQCPLVENVLVLRRTGNKVPMTEGRDKWWDEECAKMPAYCPCERMASEDPLFILYTSGSTGKPKGVVHCTGGYLLGAALTLKYVFDAHPDDRFACMADIGWITGHSYIIYGPLANGITTAVFESTPVYPTPSRYWDFVDKWKATQLYTAPTAIRLLRRMGEDHVKNHDLSSLRVLGSVGEPINPEAWHWYNDFAGKNQCAIVDTYWMTETGSISIAPLPGAISTKPGSATFPFFGMDVDIIDPQTGQVLXGNDVEGVLVARKPWPSIARTVYRDHKRYLETYMKPYPGYFFFGDGAARDYDGYMWIKGRVDDVINVSGHRLSTAEVESALILHKGVAETAVVGCADDLTGQAVYAFVTMKPEFDLKSTKEADLSKELAIQVRKVIGPFAAPKKIYLVSDLPKTRSGKIMRRILRKIVAGEGDQLGDLSSIADPQIVDR

SEQ ID NO: 3276 - protein, 733 aa, Cryptococcus neoformans
  MISC_FEATURE (274)..(274): Xaa = any amino acid
MGSDVDLGSEDDQSLESDDEDEFSGSEDDVDVTAAFDDFSSDEEKDEPERRKRKKKEEEAEYELAGRSRWAAKPEEPEEDSVEVGRLPIKLPTGEIQMVQGSTRIAVPQPKKPVTKAESEDEETDEVDEEEENSDDGAQAMRMASQKGKFGRMGIAEIVGRKGWKNVQRLEAAKEQVAQLGSEILAGGELVDIVSLEEGQPPLSVPASIRGLVFLSQLAVYKDLIPGYRIRELTALEEAEKVRDEVKRLREGEKMLVKSYKGYLKMLEAEIKSXFNGCMLAGINGLLKGKTNLATISLRCMCELLTSVTHFNFSENIMGVLVGRLGRRSWDGDSDLVLQTFIRVFRDDISGQHSQTLVRLIARMIKERHFQVHPNVLFCLLHLRLKDELDQMRRGKNAKGSNKEKGGKDEIKGKKFKSEKRKKWATKNQKKREREMKEVQKEMAEAEAEVDKEERARVQTETLKNLFVLYFSILKNPKRTPLLPAALEGISTYSHFINIDFFRDLLVVLRKIIADQQLSDATNKQEEESEDESSQQLDVVGASQRIRNRLLAIATAFDLLSGQGEALNIDLSDFINQLFSLLRPLCLDTGIEDPPFLPASTKSSSGAVHTLSTSALLFRCLNASFFSRHSRSPANRSAAFAKRLTECALHFPPRTGKQAIAFARSLLSKEPKIEGLLDTEERMADGAYRPELDDPQLVNPFTTSWWEAGVLGSKHWDREVRLEMSKLRDGKVV

SEQ ID NO: 3277 - protein, 728 aa, Cryptococcus neoformans
MVAIPRLARLSVPAWALSARGRFYATVSTPQTLVEKIVQKYAVGLSEGVKVRAGDYVMIKPEHVMTHDNTGPVISKFLSLSCSKLDNPRQPVFALDHDVQNQSETNQKKYKKIQAFAKEHGVDFYPAGRGIGHQIIVEEGYAWPGKMVVASDSHSNHYGGVGCLGTAIVRTDAAGIWATGKFWWQIPRIVSVSLDGRLSPGVTGKDVIVALAGLFNKDEVLNAAIEFTGSGVEHLSIDERLTIANMTTEWGAVAGVFPVDDKLKEWYQGILRKAELRKFISPTVPSTVGAKVHPRLNAARLDDAMTNRVVADPGAHYAARLSLDLSTLVPHVSGPNSVKVATALPKLLDPPIPINKAYLVSCTNSRASDIASAAQVLRGKKVAPGVEFYIAAASSRVQEDAEAAGDWQTLIDAGAKTLPAGCGPCIGLGVGLLEKGEVGISATNRNYKGRMGSPDAIAYLASPAVVAASAAKGVICGPESMDLSQLPQYEQPKFSIIKEGAAGEEKPVEVDEASLEPLLEGFPAYFEGPLLFAPQDNLTTDGMYPGKYTYQDDITPERQAEVVMENYDPTFAATARELRTALPTASSPSTLPGAILLSGYNFGTGSSREQAATAIKNAGIPLVICGSFGDIFKRNSINNGLILIESPSLIKDMTERFAKDGVRNKGGKDGKLTVVPEGWRIKVDSQRGLVTVNMGEEEEKTYPAAKVGRSVQELWVNGGLEGFIRASL

SEQ ID NO: 3278 - protein, 741 aa, Cryptococcus neoformans
MNNDERLEYLFRLCYTYPPVTCHLKSTNKRTNQNRLVIFTAMNTTDILFLQKADNVDEAPLQAVVLADSYNRRFEVLCTDQPRVLLPLCSTPLLAWTLESLSLSKVKQVFIFCGVHADKIRTFVESSPYRAMLDIHCLSSQTARSAGDALRELDDMHVLNPDNPFILVHSPLISNYDLSKIIDAHRKRRDVDKNFIMTMGVSRGGRPHPESPIMLVHPPSSRLLHYAPHPLSPTQPRISFPSSLFLDPFPATIDTYEIWSGTSPSSSNQGGYRDLGVDICEADVPALCTENFDYHDLRRHFVNGVLTSELLGKKIAVHVVGQEEESLDARAGGGRYVESVRDTRTFGEVTRDVLRRWAFPLAPDLNEPGGSQYELRAGNVYIAKESVVLSRTTTLSGPLLIGPRSALAHNTLVRQSTLGADCKIGAGSIIRKSYVFDDVKIGEGCVVEECMIGEGVVIGHGCKIGKGVLLGNGVRLGKGVVVPDFSRIGRQPYRGDDWDSDEERDEFEKEEILSFLGEDSIGYLWPNEEEEPPSDSEDEGEDPYEHPRNKKLLQLGRRLSNLSSPSTSISTLSAASSSAPSSPLSDASSTSLPDIPSLSLDAGPDKAFYSEAAASLQRAYEEDHKIENALLELRTLVMGYNAGLERAREEVVKFFVSKIDVRGPATSILSSAVKIFSRWGPLMANLTSDPTLLILDAQQYCVSTVPFAYIPWFGIILRAMYETDLVGEDELVEWGDEQLAR

SEQ ID NO: 3279 - protein, 744 aa, Cryptococcus neoformans
MGGLNVQGAGRTKFKYLRMLREVANRRREDIVIDLKDLKRVGKRDDLLNDLSLLHNIQNNTRRYIQLFSDVIDKIMPPPDNEVDYTDDVLDLIMQQRREMNAQVEAGERNADAGMFPPELMRRYNVYFRPLRSDDVLAVRAVRGAHLGKLITVRGIVTRVSEVKPLLIVNAYTCDSCGNEIFQEITQKHFAPLTVCPSDVCVRNQTNGQLHMQTRASRFRPFQEVKIQEMADQVPVGHIPRSMTIHLYGALTRSVNPGDVVHIGGIFIPTPYTGMRALRAGLLQDTFLEAMHVHQLKKQYHAMESTPEIQEAIADLKSDPALYARLANSIAPEIYGHEDVKKALLLLLVGGVTNSRKDGMKIRGDINVCLMGDPGVAKSQLLKYITKVAPRGVYTTGRGSSGVGLTAAVMRDPVTDEMVLEGGALVLADNGICCIDEFDKMEESDRTAIHEVMEQQTISISKAGITTTLNARTSILAAANPLYGRYNPKISPVENINLPAALLSRFDVLFLILDSPTREDDERLAQHVCFVHMHNTHPELDFEPVEPTLMRHYIAECRKIEPRVPQALSEYIVSSYVQMRKQQQEDEAEEKSHSYVSARTLLAVLRLSQALARLRHDDIVQQGDVDEALRLMDVSKASLYEHSQQRNGEDQTSTSKIFRIIKDMAQRAADEDDDEEMGELAMMDVRNRVIAKGFTEMQLMETILEVSFYRCFFSSIKLTPVVQYENMDVLMRTANGSRLQFVTV

SEQ ID NO: 3280 - protein, 695 aa, Cryptococcus neoformans
  MISC_FEATURE (152)..(152): Xaa = any amino acid
MPPRRHTDAHGSPGFSHLHPAMTRPSLLNAQTHALLTLLNLNNPPPANPAAAGPFPRPSSPGAPFDDAAQPPLVWKVLILDDASQDVLATTLRVQDLREQGVTLHMQLHSARPPLADVPAVYFVSPTLSNIRRIAEDLNPPLYASYYLAFTXSLPRSLLEELASLILSNDPSGQTGQLIASVTDQFLDFVVPSPNMFSLLPRRELRQDADGAAGKGKKGKDVGRIANGLFSVITTMNMTPIIRCPRGNAAEMVARRLDAKLRDHIASTSSRNTRDAYTVDALQRPLLAIMDRNIDLIPMLSHSWTYQALVSDVLDMKLNRVTVSSPENGRLTKKSYDIDSKDFFWAKNAGNPFPAVAEDIDTDLSKYKTDAAEITRSTGISDVNDVSQIDFTSNTANLKTAITALPELTARKQILDTHMNIATALLQSIKERGLDNLFQVEETASKQTKATILSVLNGATDEPGQTASPSPLDQLRLVIIYFLSTQDGALSKEDMKELEGVLKEHGADTRALEYVKKVRDIHRMSTLAVQPAVAAQSQSGGGGEWTRGFSALGNRVKGGIPTVGLDNLISGVKSFLPARKDLTLTRLVEALMDPASASSQALQDTDDYLFFDPKTSRARPGHAGGGGRSQFSEGLVFVVGGGGYVEYGNLMDWANRSGGGGRKVTYGSTEILNPEKFLKSLEELGSLAVGFLWSS

SEQ ID NO: 3281 - protein, 749 aa, Cryptococcus neoformans
MGKSTKAFKKFASSGKLKDTIQKRRQHQQAKRKSDDIKTQRAKQRGAAHDPEDESEGEGSEGEDEEDEKEAKRIGKPNAGGKAGGVAKTVEDLFGAGGLDVEDDEESELEELGSEDEDEEDDGDDEEDEGEGDLLDEEAMKKAMKDLAKNDPEFFKYLKENDEDLLDFGQSSKANKGKGKQDEDDEDDEDEEMESDEDLLEEDEEEEEAERKRITVTLKMLRQWQEGMLRQHSIRSLRKTLIAFRAAAHMNEDDGDQGSGLDTKYIIDSAQVFNKIVVTALKFTPVVISHHFPYKTLPSGKVKLQPPKKTNQTLNRLILSHFSTLLHLIKSLPTTPSSVASKKDEGASGLLLTAVGESTKLIPWVLSARKHLRAYLKVLLDLWSSAGDDVRIASFLAVRKLFVAGDDAVKDLCLRNIYRSLPSPLRNTTPHNLPSLNLMKNTASELYQLAPSLSYQHAFGFIRMLAVHLRNVVRSSTTGKAGDNQQAFKTVYNWQYVHCIDFWSQVLAGAASVENQKANAGLESPLKPLVYPLVQIALGAYRLLPSSRYFPLRFHILHSLLRIISRTGTYIPLAPFLLEILDSTEFRRANPKKGTIKPLDFEYIIRAPAAYPKTRVFQEGLGEELVFLLGEYHAAVSTQIAFPEMVLPVILTIKKHIKKGSAGSPKVVSSLKVLVEKLEATRTFIENKRRNVSFAPRDRAEVDRFLEGQGPEVTPVGNWMRLQRKIRDQKRSEVEKALREEQDEDEDSE

SEQ ID NO: 3282 - protein, 699 aa, Cryptococcus neoformans
  MISC_FEATURE (215)..(215): Xaa = any amino acid
  MISC_FEATURE (224)..(224): Xaa = any amino acid
MPDVVLPLVQTPPFVIIALAALQGIPVTWDAQSGEQGQTTYGDIVGAENVRAELEKGVDGKEVSKKRVHNPLNSFQDVSAVLDAFDDYLAYRTYFAGPKFGFGDATIWGTIRGNNSAIGSIKKPGRPHLQRWFNHVETLDVPKAALESHRQAKSEMEKGKKTKRLESIDVVLPNAIKGKVVVRFAPEPSGYLHIGHLKAAILNRYLADQYQGQVXLRFDDTNPXREEGEFEEAIQEDLKMIEISFDKIVHTSDHFDKIQAYAEQLIKQGDAFMDDTEGETVKEQRRAMIPSKNRDLSIEENLVKFKEMCEGTEEGKRWSLRAKIDYQHKNGTLRDPVIYRYVEGSHHVTGTKYKSYPMYDLACPIIDHLDGVTHALRANEYWARHEQYQWFLKTLGFANIEIFDFSRVDFVYTVLSKRKLKYLVEKNVVKGWDDPRFPTVRGIRSRGMTVQGLKNYILGQGASQQAVQLEWDGIWTVNKKVIDPVAPRYWAIAEDRMVSVNVIGRETEEPEVVSRPLHKKNPEVGEKKLVFASKLIMEQEDAKTFGENEEITAMDWGNAFVTSKITTPSGDVSSLTITLHLAGDFKKTSKKVTWLAAPTDANPLIPVVLIEYDYLITKKKLEEDDSLPEVLNPKTEYRTYALASKEVEGLKKWDIIQFERKGFYICQGTRDNQGRMEFGFIPDGRAATGVESRARKGKN

SEQ ID NO: 3283 - protein, 687 aa, Cryptococcus neoformans
MPGPTPSAHQVLVYSGPGVSPLSLSHTLLTLRLLLLPHYTVQPAAPDLLALQPWEPSCALLVVPGGRDLPYVDELTHKRPVTNRIREYVQQGGRFLGICAGAYFASAEVRFDVGGGMEVAGKRDLAFFPGPSRGPVFQGFQYASESGSRAVVLNLESSKLETLNHIYYNGGGQFILPSPPPPNVQILARFQETCSDPSGQQQQQLVAAVFTQNGKGCTVLSSVHPEYPLSDPPASNAIAKLDVRPSQVEVEMSDKARLSWVEELLIKLGLTPPERLTAANRAKSSADSEHEDEDPALLLHPTHPSPIFFLDANDEIRFGTTEATSPERAASEDGITQWLAQALEYSSRWTPLFNFSTYWDELDQARKRSGRRSGVMRQGSDGQGERCSLGDCVLYGETVTSTQTMLDGNPLLLTNLPTPLVFLASFQLSGRGRGSNMWLSPPGCLQFSLLLDLPASLSSKMVFIQYIMALAVCEAIDEDGRLGVRIKWPNDIYAEVEGVGGTEIGSGKKGKAKLGGILVNTSFVGGKWRIVVGCGINILNALPTSSVSQLHALLAAKLSSTSSNKPLPPAPTMEGTFARIMSSFDAKWEQFIEEKGFKGFMDEYHGRWLHSGQDVLLTTTEPHTRVRILSITPDHGLLRSQTQNHSPFVDLQPDGNSFDLMSGLIKRKIRGSVYCRYKKLDIDILSL

SEQ ID NO: 3284 - protein, 720 aa, Cryptococcus neoformans
MDYCNTSLPFSLVFLLILAQKMSGQQPPSFNPGAFEFRPGQAPFAPRQQQPFDPYGQQQGGYPQYGQYGQQQGYPQYGQYGGYPQQQGYPVPGAPGAGPRAYQPPQARNVQGFQPPSFSSSPAPPPDTKAPAGKPVSLSIGGGGAPKAAPSLSIEKEASSKSSPKPAAPTPKPADAPAAKSEAASAPVSAAEKKAEKAVPLTSDAQGKVVAAETSAASPAKSGASTPVATVSTSTTNFSKVSAKNDAEAIYREQNLAGDAALRDLYGENVKDTNIKSHLNIIFTGHVDAGKSTMGGQLLYLTGAVDKRTMEKYEQEAKAAGRETWYLSWALDSGKEERAKGKTVEVGRAYFESEKRRYTILDAPGHKTYVPSMISGAAQADVALLVLSARKGEFETGFEREGQTREHAMLIKNNGINKLIVVVNKMDDTTVQWDKGRYDEITTKITPFLKAVGFNPKTDITFIPVSAQIGENMKDRVDKKIAPWWDGPSLLEHLDNMEIMDRNINAPFMLPISEKYNELGTMVMGKIESGHVKKGDTLLMMPNKHTVEVTGIFSEQSEDMDMAFCGDNIRMRISGVSDRDITPGFVLTSVQKPVKAVTAFKADISFIDTKNIICPGYSCVLHVHTLAEEVSVTSFLHYYEKKTRRKSKKPPQFAKAGMLVSALIETSAPICIERFEDYKMLGRFTLRDEGKTVAIGKVTKLIERSEDMPDVAALSLKAAS

SEQ ID NO: 3285 - protein, 717 aa, Cryptococcus neoformans
  MISC_FEATURE (182)..(182): Xaa = any amino acid
  MISC_FEATURE (452)..(452): Xaa = any amino acid
  MISC_FEATURE (528)..(528): Xaa = any amino acid
MAGRDPRDRAPRVRNRAPAAVQVSEQLLREAQERQEPAIQAPKQRVQDLEELSEFQARKRTEFESRIRYSRDSILAWTKYAQWEASQNEYERSRSVFERALDVDPRSVDLWAMQIKYTDMELKARNINHARNLFDRAITLLPRVDALWYKYVYLEELLLNVSGARQIFERWMQWEPNDKAWXSYIKLEERYNELDRASAIYERWIACRPIPKNWVTWAKFEEDRGQPDKAREVFQTALEFFGDEEEQVEKAQSVFAAFARMETRLKEFERARVIYKFALARLPRSKSASLYAQYTKFEKQHGDRAGVELTVLGKRRIQYEEELAYDPTNYDAWFSLARLEEDAYRADREDVYERAVANVPPALEKRYWRRYIYLWLQYAAFEEIDTKDYDRARDVYKAAVKLVPHKTFTFAKLWLAYAYFEIRRLDVSAARKVLGAGIGMCPKPKLFTGYIXLEMRLREFDRVRTLYREVLDCELSSLSAWIQWTQVESAVEDFERVRAIFELAVQQSLDMPEIVWKAYIDFEAGEGXRERARNLYERLLERTSHVKVWISYALMEIATLGGGEDEDGNEIEGEAGDADLARQVFERGYKDLRAKGEKEDRAVLLESWKSFEQEHGDEETLAKVEDMLPTTRKRWRKAEDGSGELEEYWDLVFPDDEREANPTSFKFFQAAQAWAQQRAGQGEEGGLSYDLPSDSEDENEDGDEDGDGREEEGMDQD

SEQ ID NO: 3286 - protein, 686 aa, Cryptococcus neoformans
MGKILAGDSESYQYLIESIERFPSQPEFAKLAFVTFLTAGFPTRDATVPLMLALEAGGADIIELGVPFSDPVADGPVIQKANNVAIENNVHYSDCIEYVRQARAQGLKAPVLFMGYYNPIIAYGEERAVKDAREAGANGYIVVDLPPTEAVDFRNTCTKAGMSYIPLVAPSTSIDRVKFLTSIADSFIYVVSKMGVTGSSSSENISASLPELVKRIQTFTTIPLAVGFGIDNRTHFDYVTSSGADAVVVGSKIIKLIFEHADDGLAPKVVEDYCREITLKGQNPPPLGRKNAAAPPPANGVKVTAAGKLPSRFGLFGGAYVAESLVDCLNELEAAYAEAKEDPAFWKEFEDMFGYINRPSELYLAERLTEEMGGARIWLKREDLNHTGSHKINNAVGQILLAKRLGKRRIIAETGAGQHGVATATVCAKFGMECDIFMGAEDVRRQELNVFRIKMLGGRVIPVTAGSQTLKDAVNEAMRDWVTRLDSTHYLIGSAIGPHPFPTIVRDFQRVIGREIKSQMHEKMGKLPDAVVACVGGGSNAIGTFYDFIEDPSVRLVGVEAGGIDTEAHSATLTKGVMGVVHGAASYIIQSKEGQLTPTHSISAGLDYNSVGPEHSHLKYSGRAEYVVADDLQCLKAFKMCTELEGIIPALESSHGLWGGMQLAKSLPKDKDIVMSAFLQFALLHL

SEQ ID NO: 3287 - protein, 720 aa, Cryptococcus neoformans
  MISC_FEATURE (191)..(191): Xaa = any amino acid
  MISC_FEATURE (488)..(488): Xaa = any amino acid
  MISC_FEATURE (502)..(502): Xaa = any amino acid
MSVRNIREAEGLLMEVHDPSKGPDGQRNVLITSALPYVNNVPHLGNIIGSTLSADVFARYNRTLNVPTLYICGTDEYGTATETKALEEGVTPYELCTKFHKLHTEIYEWFQISFDKWGRTSSPEHTEITQGIYRRLHDNGLFRLETTDQTYCVDDKLFLADRFVEGICPNCGYDDARGDQCDKCSLTFSSXTQLLNPRCKRNKAHTLSVRPSTHACYRLDLLQPRLVEWMQKARVKGKWGTNAVITEKGEIVEPRMLGEGLRPSAVTRDLKWGVEVPKVGDEEEDKAMEGKVIYVWFDAPIGYPSITATYTEEWEKWWKNPDNVELYQFMGKDNVYFHTVLFPAMLLGTEERWTMLHNISSTQYLNYEDTKFSKSRNVGVFGNNARETGQPPEIWRYYLISQRPENSDSSFLWSKFIAANNNELLANLGNFVNRVVKFINAKLDSKVPGPEDFAGGEVAPPADSLDVDFVTDVNTRLKEYREQMDDTXLRGGLATAMALSAXGNQYLQENSLDNALLASNPKRCAEVLLNAVNLIYVLSVVFHPFMPNTSEGILRQLNAPARSLPTKFSIDILPGHVLGKAEYLFKKIDNVNGEQEKKWQRQYGGDAVVADHVAPPGPGGHPEGGKVPKVKDTDAESKKAAHEARRAQLAKEKKAAQAAADAKKTPEEKELEAKVEAQGKRLAAIKKGLEEGDAEKEMSVAKSLKTELADLRKRLKGTTI

SEQ ID NO: 3288 - protein, 747 aa, Cryptococcus neoformans
  MISC_FEATURE (564)..(564): Xaa = any amino acid
MGPAPALLTFRLSRLTRRVVYVSDDGGGGVDVEKLFLWKRKRRAGQRRDTMSGLPSLNAGITAAWNTSAPPQKKRTRRAIPLNDLPAPASPLDDSPAPATPAAPPRRKRPRAAPSVIAAKYAPPDLDLGALGGLQPQITQLLEIAALALFHPEIYLHTGVPRPKGVLLHGVPGGGKTQLVRCLAGELKLPFISVSAPSIVSGMSGESEKTLRDTFDEAKKVAPCILFLDEVDAITPKRENAQREMERRIVAQLLTCMDDLAASEEPVIIIGATNRPDSLDPALRRAGRFDHEIEMGVPSQEVLCSKLRLSGDVDFRQLAKATPGYIGADLTALTTEAGIIAVKRIFDSGFGIGSGTDTPHDSEQGTVPEPDGAGMEAMAIDDRYTPFANLPDDVKETPIAKFLMSHPTALTSDQLSTISLTPADFLAALKIVQPSAKREGFATIPDVTWSDIGALSQTRDELHMAIVQPIRHPELFSVVGIDAPSGVLLWGPPGCGKTLLAKAVANESRANFISVKGPELLNKYVGESERAVRQVFARARSSSPCVIFFDELDALVPRRDDSMXSESSARVVNTLLTELDGLDARKAVYVIGATNRPDMIDPAMVRPGRLDKLLYVDLPSPSERFEILKTHTKKTPINEDSWQAIKEIVASDKCDGFSGADIAALVREAATLALRAALESIGAFETPAEAEPEGIERKTDSVRVTAEHFAHAAQKTLPSVSREQRLKYERMRDKCGCAYQREKAARG

SEQ ID NO: 3289 - protein, 752 aa, Cryptococcus neoformans
MLFGSVSTRSITSHFKFAPRLLSKTSFTVSAQSSSKKMGVNDKPTIPTTAPHAWPSPEDWPAAKVRQTFIDYFVNQPGFEHTFWPSSGVVPFDDDTLLFANAGMNQYKPLFLGTADPKSELSKLIRAANSQKCIRAGGKHNDLDDVGKDTYHHTFFEMLGNWSFGDYFKVGALTMAWDLLTRVYGLPKDRLYVTYFEGDAKQGLEPDSEAQQIWRDLGVPESHILPGNAKDNFWEMGATGPCGPCSEIHFDRIGGRDAAHLVNADDPNVLEIWNNVFIQYNREPSGELRTLPAKHVDTGMGFERLVSVLHNVSFNYDTDVFTPIFSKIQELTGARPYEGKLGDEDKDGIDTAYRVIADHIRTLTIAISDGGIPDKDGRGYVLRRVLRRGVRYASNKFGVKIGTFFSSLVPTVVESLGPIFPEVTKKIPELTEILNEEEASFARTLNRGEALFNKYATTAIDEKRTVLSGKDIWRLYDTYGFPVDLTQIMAEERGLKIDQEAFEKARLESLEASKAGGKEKAGALVKLDVHDLAALEANDAVPKTDDSFKYHLDDIKANVKSIYHGSKFLNSTSELPPNTTFGILLDRTNFYAESGGQEYDTGVIAIDGKAEFKVEDVQVYNGYVLHIGRMEEGDIEIGDEVICTYDELRRWPIRNNHTGTHILNFALREVLGDHIDQKGSLVAPTKLRFDFSHGKSIAVPELIKIEGICNDWIKRGVPVYAKDMPLAEAYKIPGLRVVKPFSSLFEVTTQHM

SEQ ID NO: 3290 - protein, 719 aa, Cryptococcus neoformans
  MISC_FEATURE (195)..(195): Xaa = any amino acid
MPTITNTFISFPPFTDTFMAQYTPPATDLTAWRLKVSEDSHGQQKWVYLSDPAQRKEWPQMNIEKYWLGLDEVPELEEPKTPLDAARNGYRFYKELQSEDGHFSTEYGGPLFLIPGLIIALYVTGQSLRHEQAIEMRRYLFNKRRKEGGWGLHTAAPPTVYGTVMNYVALRMLGMGPDEGPMTEIRSLIHKMGEXGATGIPTWGKVWLSILGAYEWDGVGSVPPELWLLPDWAPFAPWRWWIHVRQVFTPMSFLYGTRFVGPFTPLVFSLRQELYVEPYETINWPSQRSNISSYDIYSPHHPILDMAHQLLAVYEKLPHVPILSSRLPLRKVALDKVYRMITYEDENTTYQTVGPVSKAFHIVCRFAREGPNSEAFKSHLSRIDDFLWLSKSGLMMMGTNGSQMWDTGFMAQAAVETGLAEESEFKESVKGMLDWLDKAQMRENPKWYKEGYRHRTKGAWPFSTPEQSYTVSDCTAEGLKAVLALQHLDYTPKPVGLDRMRDAVDTLLSMQNKSGGFASYELTRGSTKLEWLNAAEVFGDIMIDYTYPECTTSVLSALKYFSKVDTEYRAADIELTIRRAIQYIHDIQRPDGSWYGSWGICFTYATMFALESLGIAGETCANSDKVRRACDFLVGHQMEDGGWGETYMSCVTGKYAQHDQSQVVQTAWAILALIYGQYRDKTVIERAAKLIMSRQLKDGRWEQEDTEGIFNKNCAIDYP

SEQ ID NO: 3291 - protein, 761 aa, Cryptococcus neoformans
MPKPKTARGILLTSNLPQLQNLIKRDPEGYKEEFLTQYNHYLSLLRLHSVASSTPSSSNDKSNELFADLITFISQVAQCYPEATKDLPMQLSGLLLGGESGTSNVVTGDLRKTAVKNLVMLRNKEIIDSIQLLQTLLPLLPTVPSTLRSIIRHTILTDIKTSNAKTKNHRLNRVVQSLLFGMVESEKGGEAMWAVMMVKELWRKGVWTDAKTVSIVSLAAFHPNTKVQSAALHFFLGSENEDEDDSEDEDEVGEARRDVRKMEHRMEVSRGKRKKEKQVKQLKREASKKRKKRAEGAGVTPNFPALELLQDPQTFGEKLYDNLHRHDKIYSLDHKVLIMQLLSRVMGVHKLCVLGFYSYIIKYLTYHQLQVTLILVSLAQSVHDLTPPDVLTPVIRKLAQEFVHPGVGAEVIAAGLNAIREVCRRQPWCMEEDLLGDLIEYRKSKDKGVVTASRGLLQLFREVNPGMLKRRERGKAASMGLIGSQVLAYGHSADAAEGIEGLELLEEHYAKLRKEANGDVGDGSDVEMDVGEDDDEGWEGWEAESDSEADSNGWESVSSGGEDLEISDSEDESDKRRDKKDKREKKRLARGKGKAKAEDGETDEDEEMDDAVSVAATEATEASQTTKKLSLLAQQRILTPADFELLNELRLKAAKELAAAGADRFLTEAEILGPRKKAKATWEERMESIQKGREGREKFGSMKGKKKKAAPSSSTNKEKAKNKPIMMALHSNRVVSKKKASLRDKQIRLRAAIEKRKKQKH

SEQ ID NO: 3292 - protein, 804 aa, Cryptococcus neoformans
  MISC_FEATURE (63)..(63): Xaa = any amino acid
MVKSAPKTAGKSKKRAVEQVSEESDEEFGDQGSGIDMSDDEEEVDGDDEEDEDEAFPEFDSEXEDNDQEEASDEEQDEQDTDSESGYNTSDIERMYASDDDLSSEENKDLPVDEKLSRLIAKNTVKPDDSIGTDDKISRAKEGVGRLVPSKHVKGSFVREYDEYEAGYGSESSTEDNPNTVGNIPMEWYDDLPHIGYDVNGRKIFRPLQGDELDKFLANVEDPSAWTSAEDKLLQQNVQLSDKELDIIRRLERAENPDADFDPYQPTIEWFTGEGKERVMPLSAAPEPKRRFVPSKWEHKKIMKIVKAIREGRIIPNKPSAEKPRFYPIWSDADQHNPHVMYMPAPQLPPPKTAESYNPPEEYLPTEEEKAEWEAMDKEDRKTDFLPEKYDALRKVPGYKNLVQEKFERCLDLYLAPRTRRVKLNIDPDSLIPKLPAPKELKPFPIASTVQYRHPGDTRVRSVSTSPDGQWIASGSEDGVVRVWDLGNGREVWRWDLHAGPIQYVEWSPSREESLLVALVAGKIAVLSPLALVAPHIAAQTLTHSNTAFATSSATTKQGAGNEVKGIESVKWTRPSERERERGVLVYVEVPGTPKQVTWHRKGDYFATVASDAANKSVLIHQLSRHGSQSPFRKTPGTIQRVAFHPSKPHFFAATQRYIRLYDLAAQKLIRTLQSGVKWISSMDVHSGGDNLIIGSYDKKLAWFDMDLSAKPYKTLRYHNRALRSVAYHPTLPLFASASDDGTVHIFHCTVYTDLMQNPLIVPLKILRGHKVIDGIGVLDLRWVPGKPWLVSSGADGEVRLWCS

SEQ ID NO: 3293 - protein, 722 aa, Cryptococcus neoformans
MMQNELTWVLAGIQLRQWSLDFEGNCERILRSIAIAKSRGATLRVGPELEVPGYGCLDHFLEGDQTVGDTMLHSWEVLAKILQSEEAKGIVCDIGMPLEHKNNNYNCRVIIFNGKILLIRPKMWMANDGNYRELRHFTPWHKHRQVEKHSLPHMIRIVTGQTYVPFGDAVIATEDTVIGVELCEELFTPASPHILMGLDGVEIFTNSSGSHHELRKLNRRVELIKEATMKLGGIYLYANQQGCDGDRLYYDGACLIAMNGQILAQGPQFSLSEVEVVSATVDLRAVRAHRTTSSRRMQSAQAEAYERVVADTRLDGGEQIKVGLRETKGSMDVRYHTPEEEIALGPACWLWDYLRRSRTQGYFLPLSGGIDSCATAIIVHSMCRLVVEAAAKGDEQVITDARRITNEPEDSTYIPEDPREFAGRIFHTCYMGTENSSSETRERAKNLADAIGAYHVDLNMDTAVSAVKGIFSFVTGKTPQFKAHGGTNAENLALQNIQARLRMVVSYMFAQLLPWVRGKNGGLLVLGSANVDESLRGYFTKYDCSSADVNPIGGISKVDLKRFIAWAQVKFDLPILYNFLHAVPTAELIPIGPDNIIQSDEIEMGMTYDELSVYGRLRKVEKCGPFSMFGKLVQEWGSFLSPKEIAEKVKHFFFMYAINRHKMTTITPSVHMESYSPDDNRFDLRPFLYPSQFTHQFRKIDELAGKLPDMAQKPKVDTNEVD

SEQ ID NO: 3294 - protein, 794 aa, Cryptococcus neoformans
MMRDRCVVAVANKFLNDAASSDEESEEEDKIIVLSAKDKRFAEMEAAIHSIQNAVKNTDWVLASSELDKLFRFIARHLVTIVASPIPAEGHIPPRFLETLVSLEADVAKTLAAEKSAPKKMAPAKAKAVNGIRQTLRKRSKEFDGVLKTYNEDPEAYTAAYEKANAAPAAPKPKKAAVTTPGEGEDDEFMTIGKGGKTLNLTADGVFKTLREIFEARGRKNTDRAETIKILTKLLEVSETTYQKIRVLLALVPARLDYSQHLVSIPQESWVTALQEFDQLISILIAEPDYLVQETVGEYDDLVERTPEVVDGKKQKVLIAGSLISLLESLDSELTKTLQHTDAHEKGDEYIDRLKHEAPLYTTIVKAQTLFEREQLSDNIARTVIRRLEHIYAKPDIIIEHFESKATQAAAGLKSEITPFDVKRDASGVIHDLAVFIYQSDAPVLRARAILYHIFNQALHGRYHQARDLLLMSHLQDTISHADVTTQILYNRAVMQVGLAAFRLGFIPECQTILSEMFSTLRQKELLAQSVQRYNIQLSPEQELLEKRRLLPFHMHLNVELLEAAYLTSCMLVEIPLLASVDTEEQRRRVTSKTFKRLLDMADRQAFMGPPENTRDHIIKASQALQAGEWEKARDLIVSIKVWSLLDNAAEVKDILAKKIQEEGLRTSLFTYAAYYDSLSLSHLASTFNLPVGRITSIISRMIYTDELAASLDQIDGVVIFHRVEQSEVQRLAQQLAERTASMLEQNEKTLDVKLGNQGQGQDRDTRAVGGEGGRQQGERGRQGNIPGTRWKRR

SEQ ID NO: 3295 - protein, 807 aa, Cryptococcus neoformans
  MISC_FEATURE (387)..(387): Xaa = any amino acid
  MISC_FEATURE (496)..(496): Xaa = any amino acid
MNNSLLHHPSISSFIPRTLTMADQQLSQGNLPVFIDDLIADRTRQFVEFLDDEVTAYNYRESIKRMLDDEQVRLIVDINHIRSYERSYADGLLLQPMEYVPALDAALMQLVQSLHNPTKHKIEDKQCEYHRLFYVGLIGSFGQQHCNPRTLRSHQIGKMVSLEGIVTRCSLVRPKMLRSVHWSPRTQKFHARTYNDSTIIAPSANLTGTTTVIPKDDGDGHPLLMEYGLSTFRDYQTIGIQEMPERAPAGQLPRSIEVVLADDLVDCCKPGDRIQLVGVYKSSGGGAGARGFITSIIANNIILLSSKQGGGIAQTPLTDTDIRNINTQARRKNVFQLLSQSLAPSIFGHDYIKKAVLLLLLGGEEKNLDNGGHIRGDINILMVGDPXTAKSQMLRFVLNTAPLAIATTGRGSSGVGLTAAVTTDKDTGERRLEAGAMVLADRGVVCIDEFDKMSEIDRVAIHEVMEQQTVTIAKAGIHTSLNARCSVVAAANPIYXQYDVHKDPHRNIALPDSLLSRFDLLFVVTDDTDEQRDRMISEHVLRMHRYIQPGAEEGAPPIENLEQNLDVGGDAVESRISETPVFEKFNPLLHSGVTTTSGRGANKKKEVLSIAFVKKYIQYAKSRIHPVLTKGAADWIVNVYSSLRNDDMAANQKRTSPLTARTLETLIRLSTAHAKSRLSTRVDERDAMAAEEILRFALFKEVVRPERRKRRKINHAGQSVEVDSDEDEEGEEELQGCGENVNEWGCWCDRVSERKSERKEQTGGKTSSRPRARGRRRFRDARSRGITCFARSPSFTTHGARSCCRTF

SEQ ID NO: 3296 - protein, 757 aa, Cryptococcus neoformans
MMEVSKYEPSLETNKGRKGSFSRISTMEEGRIWSVGVLEGAEQQNAPSEIERLFYDFLHGFRIEDQWTYRDALRSALLLKHHTLEVDLRDLVAWNEELAQKVQEKPGEMIPLVIRPTSEADRERERERAQNGQPSLAAEEVPDMQVAIKSGMNLLQFRQLNANTLTTLVRLPGIVINASQLTSRATELALQCKGCRSVKHVKVSGAIGGERAALPRRCDAEPVEGQRKDCPLDPYVILHDRCRFVDQQNIKLQEAPDMVPVGELPRHMMLHAERNLTGKVVPGSRIIATGIYSTFAPNHKSVSDSFTSGAPALRQPYLRVLGIELDSSAASSGTRVFTPEEEEEFQQLARSDDLYERFANSVAPSIYGNLDIKKAVTCLLMGGSKKILPDGMRLRGDINVLLLGDPGTAKSQLLKFVEKVSPISVYTSGKGSSAAGLTASVQRDPVTREFFLEGGAMVLADGGVVCIDEFDKMRDEDRVAIHEAMEQQTISIAKAGITTILNSRTSVLAAANPVFGRYDDMKSPGENIDFQTTILSRFDMIFIIKDEHNEQRDRTIAKHVMNIHMNRQTENEAVGEIDIEKMKRYIGYCKSRCAPNLSGEAAEMLSSHFVSLRKEVAQVERDNDERSSIPMTVRQLEAIIRISESLAKITLSPRVLPHHVEEAIRLFKFSTMHAVSVGSGVEGLSRTELNEEIDRIEKELKRRLPIGYSTSYQSLVREFVSGQGYSQHALERCLYILEKREVVKYTGMRRVVQRIGV

SEQ ID NO: 3297 - protein, 776 aa, Cryptococcus neoformans
MAALDDEDTSDRKLQKLDLPDFDPEVQSGDAAQVGSIGADLAVADGDEDDDTVVKKEEEKEEKMDIDKKAEEDEEEDPLDAFMRDNVQQVVEVNKADAKRMGLRVAEDGSDDENQGQVVEKDKLAEAEALLQQAAAKSRKKDLPPPDHSKIDYEPFRKAFYVPPVEVLEMDEEEAELVRLEMDGIKIRGQDAPKPVRNWGAFGLPQGLDVIKHQGWETPTSIQAQAIPAIMSGRDVIGIAKTGSGKTVAFLLPMLRHVRDQRPVSGSEGPIAVVMSPTRELASQIYKECQPFLKVLNIRASCCVGGSSISEDIAAMKKGAEVVICTPGRMIDLLTANNGRVTNVRRTTYIVMDEADRMFDMGFEPQVMKIINNVRPSAQKVLFSATFPKTMESLARRILVKPLEITVGGRSVVAPEIDQRVEVRDGDTKFTRLLEILGEMGEEHKDEDDFRTLIFVDRQESADDLFRELLQRGYVCASLHGGKEQVDRDEAIKNFKNGDVPIIVATSVAARGLDVKELKLVINYDAPNHMEDYVHRAGRTGRAGNKGTCITFITPEQERFSVDIVRALEASKAFIPDDLKKMSDSFLGKIKSGKARAAGSGYSGKGLERIERRREEKDRAEKTTYGDTSEALSLSSREGAVIPYKAKTNEFKPPETSHKDPDATDWHAIFPINDYPQKARWKATNKEQMTLLQEVSGASITMRGRFYPPGEEPALGGEPKLSLLIESNDEMRVRAAVEEIRRVLVEGSVQALNAVDRAGASGGRYAVEKVLLSSFP

SEQ ID NO: 3298 - protein, 803 aa, Cryptococcus neoformans
MESFILFLENTYTNIFVSYTESIAFPETPGSVVPPPTGDESKYYVEQVHLMKIDERTTLYVDFGHLLEREEILARAIQSQYYRFLPYLRRAVQFLVRRYEPTWLYMSTSVNASETIPSSSLTIREFNVAFYNLPLTSGIRDLRMDKIGQLMSISGTVTRTSEVRPELVSGTFVCDNCKTAIHDVEQQFKYTEPIMCQNSTCSNRNQWQLNIEQSKFSDWQKVRIQENANEIPTGSMPRSLDVILRSEIVERAKAGDKCTFTGTFIVVPDVSQLGLPGVNAEMMREAKGGRGDGGPASQGVTGLKALGVRDLQYKTAFLACMVQNADSRAGVTDVRGEVEDGQEDRESFLRSLTSQELDELRGMLNSDNIYQSLVQSIAPTVYGHEIVKKGILLQLMGGVHKQTQEGIHLRGDINVCIVGDPSTSKSQFLKYVCGFLPRAVYTSGKASSAAGLTAAVVRDEESGEFTIEAGALMLADNGICAIDEFDKMDIADQVAIHEAMEQQTISIAKAGIQATLNARTSILAAANPVGGRYNRKMSLRQNVAMSAPIMSRFDLFFVVLDECNENVDLHIAQHIVNVHRFRDDAIAPEFSTEALQRYIRYARTFSPKLTPAASAVLVEKYRSLRQDEGGPGKSSFRITVRQLESMIRLSEAIARANCQHEITPAIVREAYSLLRQSIIHVEQDDISFDDEDEGNGLNGPDGPGGDDGMDEDPQLSSADLAALDEAESNNQYMEIMNLCVLYLSEVERDSGTGVDREELIQWYLEQKENDFESEEDMEYEREVIGKALTKLAKVRLMVMRLCQ

SEQ ID NO: 3299 - protein, 769 aa, Cryptococcus neoformans
  MISC_FEATURE (639)..(640): Xaa = any amino acid
MTRACHKRHLASFLSCTHSLCGISWIGLLASSPRQSVNAPRIFSYCSFLCERNRKYVCDVLCNGLARLEYRGYDSAGMSSSLLSIGIDGDSKGSSMILFKEVGKVAALRKHIDEGIPCPLPGQAPSKEKVDMSKVFLSQTSMAHTRWATHGVPSPGNCHPHVSDVQTEFSLVHNGIITNYKELKLVLLKRGYTFHSDTDTEVVAVLCKYVWDSQPNKRLNFTELIKTVVKELEGSFAFVFKSTHFPDEIVAARRGSPLLIGVKTDRKLKVDFVDVELPTAEERAVNDVDASGLLAVPAAVAEGPGPKLRRSQSRAFLSEDGMPQPIEFFVASDASAVIEHTKRVLYLEDDDIAHIAEGELHIHRLRRDDTVSSVRAIEHLEIELAAIMKGQYDHFMQKEIYEQPESVVNTMRGRVNFDTRSIMLGGLKAYLPVIRRGRRLIFVACGTSYHSCIAVRPVFEELTDIPVAVELASDFLDRRTPVFRDDVAIFVSQSGETADTILAMRYCLERGALCLGVVNAVGSTLSRETHSGVHINAGPEIGVASTKAYTSQYVALVMIAVQLSDDSITKTARRQQIIDGLHDIPAQIRKVLAMDKVLQQMAKDMLSKEKSLLIMGRGYQYATCLEGALKIKEVSYMHXXGILAGELKHGPLALVDEHLPVIFIMTRDSLYPKVQSALAQVTARKGRPIIICNEDDDTVNDNAKVIRVPQTVDCLQGLINVIPLQLLSYHLAVMNGVDVDFPRNLAKSVTTETWTVHRTFFLPFLLIPH

SEQ ID NO: 3300 - protein, 765 aa, Cryptococcus neoformans
  MISC_FEATURE (41)..(41): Xaa = any amino acid
MEEPEKKEEKKFECVFSAARAAGPKAPGSKEIPEGAPDCLXGLTFVFTGEMESLGREDAQELVRRYSGKVTTAPSGKTSYVVVGENAGVSKLNKVKEKKIPMINEDEFLELIRQRSSGKGPDGTVDKAAVEKATKAREKEEKKILEQAKEMEEREKKEEKERIRKQKALEGQGMAVKKMGPASAQLWTTKYAPTSLKEICGNKAPVERLGQWLQDWQKNYKANFKKPGKDGMGIYRAVLISGPPGIGKTTSAHLMAKEAGYTPLELNASDTRSKKLIENETNVDNKSLDGFFKGQGDINAAGLKIDSRTCLIMDEVDGMSAGDRGGVGALNTLIKKTKIPMILICNDRTLQKMKPLQSTTFNMTFRRQVPNEIRSRIMSILHKEKLKIPPNVVDELVKGVNSDIRQVLNMLSTFKLGKSEMNFDEGKQLVKVNEKNTIMTPFTIIDRLTGPYAFSKNSKETLGDRIELYFHDFSFVPLFMQEHYLKTNPTVLNNLDGPEKNLKHLELVSKAADSISDGDLIDRMIHGSEQHWSLLPLHAVASTVKPAMHVYGAMRSQGGGWGSWGPAFPQWLGQNSKQNKLQRQLTDIQIRMRLRVSGSREEIREQYMPLLASKIVSPLIDRGAAAVEETIEYMDEYYLGKDDWDAFVELGVDTMRDEDILKKIPSATKASFTRQYNKTDHPIAFHKGDMFAGAKKKIDAGPVPDNEDVFEEDEPVPDEPEEDTDEEEDPLQDKLVKAVKPKGKAAAKSASKPTAAKGVKSKAKK

SEQ ID NO: 3301 - protein, 822 aa, Cryptococcus neoformans
  MISC_FEATURE (330)..(330): Xaa = any amino acid
MSGHSHRPTLKQGFKSKHASKGSLKAAAKGSYLSSSAHSHGTKNALGNSKKARLNANAQKRTAKRQAVIQDQKFFSTSSGGGHVPRIVSVVPLLPSISPRTFIANLLPSLGLDESELQEISAALADYGSYLLRAPRYKTSLQINLLPPLSVYPTLDAAFVSDYIVLLMSSVDEVQLQGETILRSLQGQVGGAEIVACVQAPESNPLRPDTRQLIHKSLLSFTRYFFPSVGKIYSSDTPQESLLLARALCEAAPKGMRGDDGRAYIVAENPNSIRWTGSGILTEDGQEKGQLEIIGTVRGGGTLNADRLVHIPGSGDYQVAAVCTSGVRGXATLSDLPEQILSAPLPSKRQQTQIATNDTLSVPTEDADDLTATNIPDLLANEQTWPTEEEMGGSMEHTVEEPVVKKRVKRVPKGTSAYQAAWIVDDDEEVDAEDLSDDESMAASGDEAASAGERSAAEDEEEFEDVEVDSRQEVAHKDLDPEQEEADYEAYLKERSKADREDAMFPDEVDTPRHIPARTRFQRYRGLKSFRTSPWDPYEDLPIDYAKIFQFENFAATSKRIQLEGAREGVKTGTRVILVLRDVPRSVIEDRETGIPFIVHGLLRHEHKQSVLHFVVQRNTEYAEPVKAKEPLVLCVGPRRYIVRPLYSQHVRGGGKGANNVHKSEKFLRPGTATVMSVFGPICFGKSPCLLMKDRGIKTGKFILSHIDAYSDLHPLSVPDLVAMGSFLSSDPTRIIAKRIILTGHPVKIHKKTATIRYMFFNREDIEYFKSVQLHTKYGKIGNIKEPLGTHGYFKAHFDGPIQQMDTICMSLYKRQYPKVSE

SEQ ID NO: 3302 - protein, 846 aa, Cryptococcus neoformans
  MISC_FEATURE (556)..(556): Xaa = any amino acid
MKSNFVFQNLCGTVYRQGNVVFTPDGNSVLSPVGNRVSVFDLVNNKSRTLPFENRKNIASIALSPDGNVLISIDEDGRALFVHFRKGTVLHHISFKRKVHHVSFSPDGKYIAITHGHMVQIWNTPSHLVREFAPFTLHREYTGHHDEVVSVCWSKTSRYFITTSRDMTARLYTINPLEGFQPKQFGGHRDVVLGAFFSQDEKTIYTVSRDGAVFVWKAKKGVSEADSDVEMDILDAPTTSTSAANLALEHAVAYTRWGVHARHFFNQPGTKVICATFHPKTSLLIVGFSSGVFGLWEMPEFTPVHTLSISNEKISSVAVSASGEWLAFGAAKLGQLLVWEWQSESYVLKQQGHYYDMNTLAFSPDGQNIATGGEDGKVKLWNASSGFCFVTFPEHTAAISTVEFAKQGQVLFTASLDGTVRAYDLIRYRNFRTFTSPTPVQFSALAVDPSGDVVCAGSQDSFEIYMWSVQTGKLLDILTGHTAPISGLAFSPTGNQLASSSWDRSIRLWSVFGRSRATEPIELSGEATALAFRPDGNEICASTLNGELIFIDVEEXQIKSVIEGRRDISGGRKVDDRLTAANNAASKYFNSVIYTADGACVLAGGSSKYVVLYDRTEGVMVKKFQISENLSLDGTQEMLDSRKMTEAGTIDSFDRQGEEEDLEDRLDSTLPGASKGDLSKRRYRREARTNCVRFSATGRSWAAASTEGLLIYSLDESTTFDPFDLSLDLTPESVMQTVVSGDHLIALIMALRLSEKPLIQRVYESIPPSSIRLIARQLPRVYITQFMKFISDHIENTPHVEFDLVWTAAMLTSHGKFLKERKGEMASTLRGLVRGLMGLEMSVAKM

SEQ ID NO: 3303 - protein, 810 aa, Cryptococcus neoformans
MVMWIYKRDGRKEPVAFDKVCLIINKLSYGLDPNFVEPAEITQKVVQGIHAGITTVELDNLAAETAAYLTTKHPDYAILAARIAISNLHKETKKVFSAVVHDLHAWVNPKTGKHSPMIDDDVYKIVMDNKDILDSAIIYDRDFAYNYFGFKTLERSYLLRINGKIVERPQHMIMRVAVGIHGSNIDKVIETYNLMSERYFTHASPTLFNAGTPRPQMSSCFLVAMKDDSIDGIYDTLKTCAQISKTAGGIGLHIHNIRAKGSYIAGTNGYSNGIIPMLRAYDATARYVDQGGNKRPGAFAIYLEPWHADVFDFIDLRKNHGKEEVRARDLFYALWIPDLFMKRVESDGDWTLMCPAECPGLADVYGEEFEKLYESYERKGKGRKTIKAQKLWFAILEAQTETGVPYICYKDAANSKSNQKQLGTIKSSNLCTEIMEYSSPDEVAVCNLASLALPAFVDLERRVYDFKKLHEITKVVTKNLDTVITRNYYPVPEARNSNMRHRPVGLGVQGLADAFMALRMPFDSPEARELNIQIFETIYHAALEASCELAEEFGTYESYEGSPISKGILQYDMWGRVPTDLWDWTELKAKIAQHGVRNSLLVAPMPTASTSQILGWNECFEPYTSMLYARRVLSGDFQVVCPWLLRDLINLDLWDDNMKQLIIAAGGSIQSIPNIPDDLKKIYRTVWEISQKAVIDLAADRGAFIDQSQSLNIHLSNPSFPQLTSMHFYGWKRGLKTGCYYLRTRPSANAIQFTVDASTLKTAEPQLQCQTLSDPFSCSRCKSCHCRQSRATHEEGHHCHHCFPSPPSAR

SEQ ID NO: 3304 - protein, 741 aa, Cryptococcus neoformans
MSASASGSSWTEPTKAQAPPKYVLLSFGMSYSYYILLYTAIYNYCTQPGKTGLPSFSPQRGGASLQGADLHRSLHNWLSAHCKSMREKLPDQELLKYYARQWDRYTRGALYVNKLFNYLNKHWVKREKDEGRKDVYQVYTLALVSWKNNFFDHFTDNKGTSRLTQALLRQIQQQRNGEEVDSGLLKKVIDSYGKFSLGLDEADAQRQNLDTYRKHFQTQFLEATDTYYRAESSAFVGSNSVADYMKKAEARLQEEADRVNLYLHDNTRNDLKTRCEKVLIEEHQAIMWDEFQTLLDSDRVDDLARMYGLLSRVLNGLDPLREKFGQHVRRAGRAAVEKVLPAPGAVNEAGKAESLDPKAYVEALLEVHGKYTSMVEGPFRGEMGFNRALDQACGDFCNSNAACTVSTKSPELLASYCDLLLRKSNKDSDAESLEASLSKAMIIFNFIDDKDVFHKFYQKKLAQRLVGSLSASDDAESSMITKLKELSGFEYTNKLSKMFTGESVFVLYRDFVLIRNRFDFQPLVLGSNSWPLHPQQTDFAIPREIQALYDRFNAFHGEVHQGRTLNWLWHISKNELRTTYLNQKYILMTSAYQMAILTQFNVSDTLSYKDIEAGTKLSPTVLKPQLGLLVKLKILLNTNEEYSLNTGFKSKKIRVNLNQTIKSEARAEQKEVIAAVDEDRKFVYQATIVRLMKGRKTMQHQALIQEVTAQISSKFTPKIPEIKKAIEYLIDKEYLERAPDQ

SEQ ID NO: 3305 - protein, 821 aa, Cryptococcus neoformans
MAPKPAKTSSKTAKLPTPAATPTRQPSVDTLSKPTVVDTPPTPASPAQVSAPVPPKKFAYPIPSRLSPSTINNTESLLRFIILALICGAAIGSRLFAVIRFESVIHEFDPWFNYRASKVLVNKGFYEFWNWFDPSAWYPLGRTVGTTLYPGLMVTSGLIWHALRAINMPVDIRNVCVLLAPGFSGLTAWATYLFTTEMSTPSAGLLAAAFIGIVPGYISRSVAGSYDNEAIAIFLLMSSFYSWIKAVKTGSSFWGMITALFYGWMVAAWGGYVFITNMIPLHAFVLIVMGRFNNRLYTAYSSWYVIGTIASMQVPFVEFLPIRTSEHMAALGVFGLVQLIGFVEVVRRLVPGKQFQLLLKAFVVAVFCLSFAALVTLTFSGWIAPFAGRFYSLWDTGYAKVHMPIIASVSEHQPTAWPSFYFDLEMLIFFFPAGVFWCFKELRDEQIFIIIYAVLSAYFAGVMVRLMLVITPVVCVSSAIAFSKLLEAYIDPVIPESDEEAGESQTQVVSKSKAKKMAAANANKSGFSFTGILSGKSVSGIFGLDTRFAVVSILSVFLFIFVLHCTYVTSTAYSSPSVVLASRNPDGSQNIIDDFREAYYWIRQNTAEDSVIMSWWDYGYQIAGMADRPTLVDNNTWNNTHIATVGKAMASNEDVAYPILRKHDVDYVLVIFGGLLGYSGDDINKFLWMVRISQGEWPDEVQEVNYFTQRGEYAVDDRATPTMKNSLMYKMSYYRFPELYGGHPAQDRVRGQIIPPNSVTLDTLDEAFTSENWIVRIYKVKKEDPIGRDHKAVTAWNGGKKLKKSPSASEGVKRGSGRPSM

SEQ ID NO: 3306 - protein, 852 aa, Cryptococcus neoformans
MKNEDIMMIQMAKQMADEHQVQAVNGALSVRTPIHPPAPPSPRAHTRTDVGPDLIRSLLIRKFKTPTPIQRAAIPPALSTPPRDILGMARTGSGKTLAYLIPLLQRTGSTHHGQGPRALILCPSRELAVQIYTEDEEGKGKEGLRWALIIGGEGMDAQFEKMSSNPDIVIATPGRFLHLIVEMHMDLRHLQTVIYDEADRLFEMGFDVQLQEILHRLPSTRQNLLFSATLPSSVAEFAKAGLVNPLLVRLDAEQKISPDLALKFFSVKPGEKEASLLVLLREVIGKPNQPEPADPSSAPQAIVFVATKHHVDYVAELLRTTGYRTSLIYSSLDQVARQQQLAGFRSHQSDVLVVTDVAARGLDIPIMDHVINYDFPAGPRIFVHRVGRTARAGRKGTAYSLIVKEDFPYLCDLHTFLGTERMGEPADVLRSLPIEQLSENVEYVFHNLDETAPHITALRNVMRKGQGMFERSRTKANPTSYRQAKSLASALSNNPPRIDDMFEDAMEVEVNEEKARLLAKVAAFAPSEAVFEVGKRESESAIIMKKRRKTVDERQKRVSKAEAEKSTASGMEKAPVKELPAPQLPSKNFKDPSFYLDHTQRGAEAEKGYSLKSGVESLSGAITDMTADEGTGPKAQKASQLSWDRKKHKFIKKNGSADGEKMIKSESGALLPASYSSGKYQEWKSKRRHMPDGPVEALALGGGRRGRHGPPGQKRKAEDGDGGEDAGGKGRKDQGKSKGTGKGKDDFKQKSPGKPGKKGIKQSSGLKSAMDIRKQREIAQKVRCTATCDILNFANGSLYHREKRRTLENPKSSESNFSSIYLCRTGVRLWTHVYIIHLGVRNTGLVMSPIVL

SEQ ID NO: 3307 - protein, 813 aa, Cryptococcus neoformans
MAVLHSKRPRMPANSQGIHQQTCINDDAAEKAKRRKSAHFHTVPDHTSISNENENPKNQAGKRVISGLAIQQQGLIQKRGKRLSAVEPNMPEVRIEVKENKYEEWMKLATDNKITANNTWSFALIDYFADLTLLRNGPDDQSINFQKASCTLDGCVKIWTSRVDSVATETGKLLSGLAGGSAETGEDDGSEGEEDEAGEPKTTRKVNFFNPAAENPTITHSRPSLQIKKFDLEFTVDPLFKKTSADFDEGGAMGLLMNHLSVDNKLREVFDAGDAVADEQDLDEEEEEGGGGMIDEVVQLEKLRSEPPLFFLYAPSASIKRELTRVTEDYIPITKFLADYSINPSLASFHFSSDSSTGNDNDPAIILGLKDSFPVDEYDHYDIPMATADDYNPMDPASNRRSGEGYDFFGSEDYDAVPAYGDGGFDEDGASMMEGGDIGSGGMFEYFDKGFGKSWAGAEHWRLRKVSRKDMATAGTITTTNSKTKVDKTPFAIDFHTPMVTSLTSSTQALFTPASNKSSITLPSTFAPTRTKNGKAVSGQRQLREERLLPDDMHFSSHQLLRLFLKPQFSLKMRPGGRNVGGMGGMIGADGEIDENFWAAAAKEREGGEFGSAPAPFESQFFQDDDDYGDMDNDVDFGPIQPNVPVLCGPGEEEDDLWAGTQMELKKARPENVNFTKKAKRVDVKRLKDDIWTGLKDLVPYSDKAGDTDTDDEDSTPSTPPEPSDSEPVKTFSSIIQSLRSTYPPQKMSEISTSFCFICLLHLANEEGLRIESERGRKGRGRCGLRGNSASGRRRGGCFGRGIKCFAGDVGRW

SEQ ID NO: 3308 - protein, 853 aa, Cryptococcus neoformans
MHILRKLHTNSHKNSAQRSSWLSAHPNLSSKPLTTSSRSSSRKQPPILSRKAHAKSGLLVFKSAAQTTNVGAIERVLNHFIAKAEARLAAAVEQAKKEVAALPDVPVVDDDLPLQPASLMLDCFVDSAGDRERIERRLIAPAQKFCWDSYDICLDIAKSNDRLEVIYQSIAHRAFHFCKIHQRKADFRRLCEQRLRKDLANAAKYSHQQHAINLSDPETLGRFLDTRFLQLETAVELELWQEAFRSIEDVHGLIAGRKGTKPSMMANYYEKLTQIFKAEGGKQTAVFHAAAWARYFQHAERAGIVNDKASGCVLLSALAVPLGEVEVKQRLVALLNLPKTPTREALVQDAAAKHLKRVPADIRQIYKILEVDFEPTTASKVLAPLITSLSPEYQPYLPALRDVVLSRLLQALAQVYDSVTLSHILDLVKPLDNTPWATDMSSLEKFLVTACRRGDIRASVDHVAQTITFVSTPPDANGLQTLAVCLYNTIQYLNPSRLAPVSRSDAFAAAIAQAEEERKAASHKRQIVIRRRELLEEAKLRREKEASTALAERLKIKAEEDARRAKEEAKQAEIDRVRKQIHETKQAEAKQLAASLAAQGALKVDISSIEDLDSSKLVAMQVEQLAKEKKELSERLRIVGKRVDHLERAMRKEERPLLAQDYERQKAEDRAAHDRANQIAREQAIEQQRAARELKQRLGRMLEDYEAVKERIESQMQEELKAAKEEARRKIEEEKAQFTEEAAQKAEEEARAAAALEAEAAAAEQRRAEREAQRQSDLERIRAQQEREEEALRRRQAEKAAATSGGSAYRPPACWYYSPHGFSSSFKWWSFMVSSTKGHGGSKRRWCPCGQFT

SEQ ID NO: 3309 - protein, 848 aa, Cryptococcus neoformans
MAPSQLAQLKAALNTAGLSRKTHSKKDKKAYKKGGARETDRAKKVEKLEEIRKNLNKFDERETRVKHDVGGRNLKGVVVPVNSPPITSDSVGLQRKKTLLPEHQLRDHRGTFRDRRFGENDPSMSIEDRMLERYTRERQRGQGKKGMFNLEDEDEDEPFGELDDGFALGGLTHGGRSVMDLPGDDFVAQGLADEDEDEEENRAGRIDKRPEKKKSKQEVMAEIIAKSKEHKYERQQQREMDAELREELDGDIADLQMLLAENAPTTPAATLFPTTSKLHPDPMPVPGGEVIGDGEYDQIVRSLAFDARAKPKNRTKTEEEIALEEKENLEKAEAKRLRRMRAGSDDEQDDEDGREEEESFDEDAEEENESDAESAMEDLTENEELSVSESEEVEPVVKRTKGKKTARTEKVKEIPYTFPCPANIEEFEEIVDPLEDSALPTVVQRIRALHHPSLAQGNKEKLQEFLGVLIDYVLILSSRPSPPFSLIQTLVPHLTALVKLNPITAAAHFVEKIKLMQKNLSRGLARGAARPDSKTFPGAPELALLRLVGLFWSTSDYSHPVVVPAVLLMGQYLSQSRVRSLRDLASGLFLCSLLAQYESLSKRILPEAVNFVASSILILLPRRKGAEVNRTYPDLKAPSTSLYLNLPSSVVPSQPLDLGSAITAVGDQDEEEAEQLKGGLLVVACKLVDKFAGLYLDSEAFVELMSPVKQVLEQSRAKKLSSELNMVLTSTLTALSKRLSNTLSTRRPLTLQSHKPIPIASYAPRFEENFAPGKHYDPDTERNASAKLKALYKKERKGAMRELRKDNRFLAGEKAREQGEKDKEYNARMRKAEGSITVERAEEKAMER

SEQ ID NO: 3310 - protein, 866 aa, Cryptococcus neoformans
  MISC_FEATURE (813)..(813): Xaa = any amino acid
MGKHDKKTGKGRLDKFYRLAKEQGYRARSAFKLVHLNRKYDLLSKARCCIDLCAAPGGWLQVAEKYMPKGSLIIGVDLNAIKPLPHVTTFVADITTPHCRQTLRQHMHDWKADLVLHDGAPNVGSAWVQDAFTQNELVLQSLKLATEFLAKGGSFVTKVFRSQDYNSLLWVFGQLFKSVEATKPPSSRNVSAEIFVVCRDFIAPKHIDPKFLDPKHVFKDIASLPTSITEPTDTSIAPTSSSTASAAAAAARLAANSHAHSNVYAPEKKRRHREGYAEGDYTLHHTASAEEFVRGQDPVLLLGNMNKIEFRNETEKGWLKSRHTTPDIIANFEDLKVLGKGDFKALMKWRLAIRLEIGLDVKADKTQDATEEVVVEPMDEEEQITEELQKLQQAKLAKTKRERKRANEKKARELLKLQLNMTVPDDLDQNDLALQGEEEIFDLEEGENEARRRGKNGGLATLVDDGEGMDLASESEEEEDEDEEDDEVLDSDEERERKTAALEGELDGLYDSYVERKKERDAKWKVKQDRLKDKNFDAWHGIQEKSDEEGSDDDDGQDDDEEGGWDVIAQKKAKYAQRSKQAQLWFDQPVFKEVGDLAALDGDDEEEEEEGESEEEESDDEDVDMEDASESSSTLEGDDDFEIVPQAPEDDGPEWDVDDEDQDEVKKKVIQGMFRLSIHKGLLTAEAVSLATALVNRKTTADKLIDQGFNRLSPHNKDGLPTWFLDDESQFYKPNIPITKEAVDALRARQRALDARPIKKVAEAKGRKKMKAVARMEKAKKKADGVMESEEMGDGEKARQVRRMLARGRQRQXKAKEKKIVVAKGVNKGVKGRPTGVKGKYKIVDARMRKEVRALKRIKKAGSKRR

SEQ ID NO: 3311 - protein, 758 aa, Cryptococcus neoformans
MPRRTRSVTFQQIEIEESADPKHGPTLRLFGVNKSGNSVLAHVYGFKPYFYVAAPSGFLNKDLQPLADKINSSISALGPCVTNCAIFNRRSLWGYRGDDTVPFIKITVSDPKNLSKVKDEFFTLSTVYVADDDSRRLYSNIAYTMRFMIDTKIVGMNWVSIPGGRYDLLEGGSKKSQCQIEISCNYKDLISHPPENEWLDIAPLRVLSFDIECAGRKGIFPEANVDPVIQIAAMVTRHGESKPFIRNVFTLNTCAHIVGSQVLEFKDERQLLLEWRKFVDTVDPDMIIGYNISNFDLPYLLDRAKALKIPDFAFLGRLRNVRTEVKETHFSSKAYGQRDSKAVNMEGRLQLDILQVMQRDYKLRSYTLNAVCAQFLGEQKEDVHHSIITELQNGTADSRRRLAVYCLKDAYLPQRLMDKLMCFVNYTEMARVTGVPFNYLLSRGQQIKVISQLYRNAADAGYVIPALKSEGSDEQYEGATVIEPSKGFYDVPIATLDFASLYPSIMMAHNLCYTTLLDKGTIERLKLVEGEDYVHTPNNDFFATSKRRKGLLPHILENLLAARKRAKQDLKVEKDPFKRAVLDGRQLALKVSANSVYGFTGATVGKLPCLAISSSVTAYGRQMIELTKKEVEAEYSMKNGYDHDAKIDTIADLLQNKIDMSQLVITKALAKADYAAKQAHVELVERMRKRDAGSAPSLGDRVAYVIVKGVKGAAAYEKSEDPLYVLEHNVPIDTRYYLENQLSKPLMRIFEPILGESQ

SEQ ID NO: 3312 - protein, 803 aa, Cryptococcus neoformans
  MISC_FEATURE (12)..(12): Xaa = any amino acid
  MISC_FEATURE (462)..(462): Xaa = any amino acid
MKFMLGDLPVLXPYDRYLTWPIAEQYSYMADLKTTLDAGGHCVLEMPSGTGKTVSLLSLIIAYMQFYPNKRKLIYCSRTVPEIEKALAELKRLMMYRAEMGANDGDFRGLGLTSRRNLCLHPEVSKEKKGKIVDSRCRDLTSAFACEKGRADPGSVPLCSFHEELNNYEPGNLIPPGVYTLDDVKKYGQEKGVCPYFTIRRMLPFLDVMIYSFHYLLDPKVAEQVSAEMSKESIVIFDEAHNIDNVCIESLSIDLTRPMLDSAARSVNKLSDKIAEIKETDAKKLEDEYAKLVEGLQEANERVEDDDMLVSPVLSKDMVDEAIPGNIRKAEHFIAFLKRFIEYLKTRMRVLHVVAETPQSFLAHLKEITYIDQRPLKFASERLTCLVRTLELTNLEEHSALQKVAGFGTLVATYEKGFLLILEPYETEHATVPNPIFHFTCLDPSLAIAPVFDRFASVVITXGTISPLDMYPKMLQFQPVMEQSYPMTLTRNAFLPMVITRGSDQVPISSRFEVRNDPAVVRNFGSILIEMARTVPDGVVAFFPSYLYMESIVSAWYDMGILSEVWKHKLLFVETPDAMETSIALRNYREACNNGRGAVLLSVARGKVSEGIDFDHNYGRAVIMFGIPYQYTESRILKARLEFLRDNHRIRENDYLTFDAMRHAAQCVGRVLRGKTDWGLMVFADKRFARQDKRAKLPKWINSYITEAHSNLSTDVAVSLAKKFIRQISQPFDHTQTGISLWTLEDIEERQRRDKDEAERVEMTQSAAIRESAAEENDHAPLASDYMEIDDAELAGLSIPIDE

SEQ ID NO: 3313 - protein, 871 aa, Cryptococcus neoformans
MPTNNTNLDRSFLTANIDDLLKQLTTEEKISLLAGKDWWNTVPIPRLNIPSIKMTDGPGGARGDSFYHMTPACALPSATSLASTFSPDLIHSAGNLLALETLARNAVCLLAPTINIQRSPLGGRAFESFSEDPTLSGLIAAAYVAGLQEGGVSAAIKHFVGNDQEHERMGEDSVIAPRALREIYLRPFQIALKKSKPQAFMTAYNKLNGTHCSENEWLLEELLRKEWGFDGLVMSDWYGTYSISESINAGLNLEMPGATRWRPNGLVTHLIKAHKIDPRQLDKVAGGVLRWVQKLAKKNEELVYSPPGKEKTRTEDQAEDAKLLRRLAGESIVLLKNELNVLPIREPKKIAVIGPNAKAKVLTGGGSAQLRSAWSSTPWQGLSDNAPEGVELSYSLGCHSDKFLPILDDSFTCPDGSPGFQLSHFPITSSGDKAEEPVHVETWDSSDMFLADFTAPGLTKEYFTQLDAVWTPVEDGEYEFGVVVTGKGWFWINGELVIDASREDERSTSFFNLGTKEIKGRTRAKKNKRYDIRFLHDTRPYSVNNINTPIASAGMRLGYIQVIPASTLLSNAVSLAASSDVALLVIGLNSGWESEGYDRPDLSLPMDTDKLVNAVAEANPNTIVVIQAGSAVSMPWLDKVKGVVFAWYLGNETGNAIADIIYGYTNPSGRLPMTFPKRELDIPANLNYKSARTRVYYDEGIWVGYKHFNARGIDPLFPFGHGLSYTTFAYSGLHISQVPESPKNVGADGWRVEVGVQVENIGMEEGAHTVMFWLSPPPESPNGLKHPKWTLQGFQKVYGLKPGAKREIKVTFDKLLDAVSHWDELWNTWRAELGEWTVRVGVDAQNISGEKATFKIEDDLEWRGLKTVQYK

SEQ ID NO: 3314 - protein, 794 aa, Cryptococcus neoformans
MADDPSRAVQDDSTATAILRQKRSPNRLVVDESPSDDNSVAILHPNTMEALGLFRGDTIIGKFRYRRRRDTVLICLSQDDIEEGKVAMNKVARGNCAIKLGDLVHVSAANDIKYGKRIHVLPFADSIEGLSGNLFDVYLRPYFLEAYRPVRKGDVFQVRGGMRTVDFKVVEVDPSPYCIVASETVIHTEGDPLDREAEEATLNDVGYDDLGGCRKQLAQIRELVELPLRHPQLFKAIGIKPPRGILMYGPPGTGKTLMARAVANETGAFFFLINGPEIMSKMAGESESNLRKAFEEAEKNSPSIIFIDELDSIAPKREKANGEVERRVVSQLLTLMDGLKARSNVVVMAATNRPNSIDPALRRFGRFDREVDIGIPDPTGRLEILRIHTKNMKLSDDVDLEQIAADTHGYVGADMASLCSEAAMQQIREKMDLIDLDEDTIDAEVLDSLGVTMENFRFALGVNNPSALRETVVEIPTTTWNDIGGLDKVKRELQETVQFPVEHPEKFLKYGMSPSKGVLFYGPPGTGKTLLAKAIANECQANFISIKGPELLTMWFGESEANVRDVFDKARAAAPCVMFFDELDSIAKSRGNSAGDGGGSSDRVLNQILTEMDGMNAKKNVFIIGATNRPDQIDSALLRPGRLDQLIYIPLPDEESRLSILKATLRKSPIDPRVDLDFLAKNTAGFSGADLTEICQRAAKLAIRASIDADIRKERERNEKAEAAGQDVELIDEENEEDEVPAITVEHFEEAMRYARRSVSDADIRRYEMFSTTLQQSRSFGSNFKESIDMRFDC

SEQ ID NO: 3315 - protein, 867 aa, Cryptococcus neoformans
  MISC_FEATURE (347)..(347): Xaa = any amino acid
  MISC_FEATURE (351)..(351): Xaa = any amino acid
  MISC_FEATURE (576)..(576): Xaa = any amino acid
MLPSTLARIPIRLLHPQATQQLRSLSNTMATNKSAVTQPTWYSPAKSADEPVLRVYNSLTRSKDVFVPTNGRRVDWYNCGPTVYDSSHMGHARNYLTQDIVRRILRDYFNYDVNFVMNVTDIDDKIILRARESYLLDQAISTNLALTPELISDVEAAFTKYLAKPLKSLTAPLEHSPNATSFEILDLLLQKDQSEAQWAKEAREREEKFGMYLASLSKARDAYNAAQQRVGKPEGEGQAVKDLVEGATDVLGPYLGEKLGHTIADPIAVCRRLASYWENAFFTDMARLRVLPPDTITRVSEYVPEIVSFVQRIVDNGFAYEGGGSVWFDVDKFEGAEGDGFRHEYAXLQPXSKGNKKLLDEGEGALTGSQGKRRPADFALWKAKSKPGEPAWPSPWGEGRPGWHIECSVMASAILGSGMDIHSGGVDLMFPHHDNELAQAEAYHGCKQWVNYFLHTGHLHIEGLKMSKSLKNFITIDEALQTYSARQLRLAFMLQIWNAKLDFKKDLIVDTKAKEETFDNFFTNVKARMSDAAARASWPSKSSIAISDLYTDSMDSFHKAQNDFRAALCDSFNTPXAIQILLDLVSSVNLYFASRGREYNIAPVVTVAQWITRMLRMFGLGEGDVTSGQIGWGKEGDEASGGDFEGKLDPYLRAMASFRDDIRRLAIDGATPGEILKLCDKFRDQDLANLGIQLDDGQSTTGGALYKLVDPAILIRAREEKERAAAEKAEKKKAAEAKRLAQLEKGRVPPQEMFRPPNVAEGTYSAWDEQGLPTKDGEGQDLSKSLQKKVAKEWKVQEKAHGAWLLAKGARGKVDGVGLWHRAMCTNIDILVFQACWLFGFPNLFFEQDFAYTGAVDYRMDDNSTER

SEQ ID NO: 3316 - protein, 811 aa, Cryptococcus neoformans
MAEEDFIPLQGSAGKKERKERVNTTLFVSSLPYTATTTDLLTHFSYIGPVRHGFVATDRESGKSKGVGYVTFSLKEDADRAIQELDGGSSVGSKRKIQVKWADERRLEKLSAKGEGKAPSHAGRLIIRNLSWDTTIQDLRKAFLPYGPIHSIDLPTLPSKLPPSSDPAKPPPPPRARGFAFVWFLARHDAEKAIEGTNGKPIKKGPDGEGRVVAVDWALSKEKWQEATKGEEKKEGEKESSDSGSDSGSESESNSESGEGSDEESSGDEGTSVVSGSEESSNTDENEEEEEEEEEEPVKPTLPTVDVGSTLFIRNLPFETTELELNTLFRSFGPLRYAKITIDKATGRSRGTGFVCFWKNEHADEVIEEAQRNPFALPSLLTADPSSSLASRLVLHGRTLDITRAVTRETASQMKEDTERLRNAADKRNTYLMREGVIFPNSPAAEGLPESEIEKRQASFNSRKALLRGNPSLYISKTRLSIRQLPLFATDRTLKRLAIHAVKAFDKEVADGEREGLARAEEMDGTMSSAIAARGDKSGGKGKGKGGKKERETAVIQSKIVRQTEKLDPVTGQGRSKGYGFLEMRSHKDALKVLRWANNNPEVGPLMWEWWKVELGDMKERTLIIEFSIENVQVVKRRVEKITTARENGKRKADIIAAEDTDDDESASSKPAGRFDKRAKRDGRDGRDRRDRHDGPGGREGLKGNFRGKQGQDREQGGKFDKDRPRGGQNGPRRDYNDRGGRNERGGRNDRGDRPGQVQPRQPGRRDQKSVNQVKKDVKTKEAGEKRGIEKFGSQLGSMIGRKRKMRKGAK

SEQ ID NO: 3317 - protein, 937 aa, Cryptococcus neoformans
MSQPIMLPQGWEARWDPQANAYIYVDQSTGRSQWEVPLNPTFPTSPTPHAPPQRHGRRAYPSAMYAHAYDTPAPHVGPPQPVAGYAEQGTPQFITPGFEGQQPVQQPPYAAVDHVAGQFQQMNIAPGAAPVAGAAAGAYQGAGYAEKQLHSTKTKTVNLIGLQPDVAALDNPPPPALLPANASVTSSAHSQPDPSYQRCTLNAMPTTQSLLNKSKLPLALVMAPYRSIRETDNDPDVPVVEDGVIARCRRCRAYINPFVTFIEGGNRWKCCMCGLSNEVPQLFDWDQRAEKPADRWARKELNHAVVEFVAPTEYMVRPPQPPVYAFVIDVSSAAIQSGMVAVAARTILESLDSLPNADNRTKVAIIAVSTSLHFFSLPADATEAGMLVVPDLTDVFLPKPVDLLVNLTESRPAIESLLAKLSDMFQDSHTVGSALGSGLQAAHQLIGKIGGKIIALGASLPTIGEGVLKARDDPKLLGTSKESQLLNAGNNWYKTFAIECSKNQVSVDMFLFSGTYTDVATLGCLPRYTAGQTYLYPGFNASRSEDAIKFATEFGKVLAMPIGLEAVIRVRASRGIRMSAFHGNFFIRSTDLLALPVVPQDQNYVIELQIEDDIKGSFVVIQTAVLHTTCYGERRIRVITQAMPTTDSIAELYTSADQIALATYLANKAVERSMSHSLDDARNHVTNRLGEMLTVYKNQVTSAAGGASAQLAVPENLLLLPLLCCALTKHVGLREGASIPPDLRAYAQCLLTTLPCQTLIPYIHPRFYSLHNMPPEAGTIGGDDGAMILPPALNLTSEKLERHGLFLIEDGQNIFLWVGHDAVPRLIQDVFDLASYHELQGGKYTLPRLDNPFSERVCNVVDKTREMRRGVYRPQVYVVKSDAEPALRSWALSLLVEDRMDRMSSYAQYLTTVKSKVGGFLFFFFFWEKADACVWFR

SEQ ID NO: 3318 - protein, 905 aa, Cryptococcus neoformans
MMKQVEYVRTLLTAQLTPAAFYHDKSTVIQEARVFNESPISPRKCRALLTRIVYLLYTGETFSTQEATTLFFGVTKLFQHKDSALRQMVYLVVKELSTVAEDVIMVTSSIMKDMQPNLEVVYRPNAIRALARIIDAQSVQSVERFFKSALVDRSPSISSASLISSYHLFPLSPTIIKRWSNEAQEAVNAKSVSSYSGASAYFSGGSAGGYQAVASSSYIMQYHALGLLYLIREKDRMAITKMVQQLGASGKGSSIVRNPMAICMLIRFARKIMDEDPNLRKQMHEYLETLLRHKSEMVNIEAARAICETKDVQPGDLYKTIAVLQLFLSSPKPVIKFAAVKTLSKLAQTLPQSVAALNVEMENLITDSNRSIATYAITTLLKLTMAQTGNEASVDRLMKQISSFMTDITDEFKIIVVDAIRSLCLKFPAKQAVMLSFLSGVLRDEGGYEFKHAVVEAIFDMIKYIQDSRDAVTDETALAHLCEFIEDCEFTKLSVRILHLLGIEGPKTRNPTKFIRYIYNRVVLENAVVRAAAVSSLAKFGVCVDDPSVMKSVNVLMRRCLDDVDDEVRDRAAMYIKVLEEKSLADLLVKDAQFSLANLEEQLMSYVRDNSKHASAFDISAVPKVSREQAHAEMAQTRSSALDVAGPSTAAVITPASPIPSAKEAQSSYAAQLSTIPEFEPYGPVLKSSAKPIELTESETEYVVTAVKHVFRKHVVFQFNVANTIPDTVLEQVAVIMQPSPDCGLIEDFIIPINSLTTQVGQAPVYVSFTRENPQEYAAGSFGCTLKFVSKEVDPSNGQPEEEGYDDEYQVEELDLGAADYITPTFVTFVNEWDKLASSPSLTETFALSSSESLREACRSLIEVLGMLPLGGTDTPTSNSVHTLNLAGCHPYSRWRKVKQGISQM

SEQ ID NO: 3319 - protein, 897 aa, Cryptococcus neoformans
MLLVLVEGKWHLRPIPVASGFTTRSDIGPARAGPSAEVVAEAQARRGEEEIPDPDAFQDPDDERNLFAGTVYEADDEEADRVWDSVDARMDARRKARRDAAEAKAAAEERARNPKLQTQFADLKRSLSSLNDADWDAIPEAGNLTGKRRKANLRLEENQNGRSYNVSDTVIADAAGIGIDGTETDLVSIGNARDRVLSLQLDQVSLDLIATRDASNGSSTSIDPKGYMTALNSQIVQTDAQIGDIKQARQLLQNLIQSNPKHAPGWIAAASLEVHAKKMVAARKIIAEGCEKCPKNEDVWFHAAELNTPENAKVILGRAIQHVPQSVKIWLKAASLETDINAKKRVLRKALEFVPNSVGLWKETVNLEDDPEDARVLLTRAVEVIPNSVELWLTLARLETPENAKQVLNSARKRIPTSHEIWIAAAEYEAEQRKKLAQQVNKLMAGAVNSLRKNQVILSREQWLQEAEKCEQDGSPLTAQAIVKATIAQDVEEEDRRSVWIEDAERATKGGFYEVARACYAVTLEAFPNTPSVWRKAAEFEKAHGTPDAVQEILAQGSQHCPHAEVLWLMAAKEKWVGGDIPGAQAILAEAFKQNEDSESIFLAAAKLAAETGEMEAAIQILEKAKAQADTERVWMKSAVLLRQLGKLDEALSTLEVAIKKFASFDKLHMIRGQIYESRNEVALARNAYAQGCRSCPKSIPLWILSARLEEKAGVTIKARALLEKARLHNPKNDELWAESIKIEERTGSPQQAKSLHSIAMQECPASPLLWSMAIFMETPQQRKGRSVDAIKKAGEHPAVILAVARNFWSERKIEKTRQWMANAITADEDWGDAWGYWLKFERQHGEKERQEAVVEKCIAASPRHGPVWQSVSKDLANVGKSTKEILELVAQTGIMF

SEQ ID NO: 3320 - protein, 901 aa, Cryptococcus neoformans
MFMFTESKGKVEATCADGVVATGGLPDFGMHPFATGTVFFLPTPVRLARRTLLSSRLSYTTLYIHLHSSHGYLHTLATELANESQGLDVRYAAGLAFKNGIAARDAINQPVLSERWLALPESATNPLKHLSLSTLGSPQLRAGAVAAQCVSAIAAIELPVGKWPELIPQLLEFVQNQDNTGLRVNTLQAVGYICEVIRPDILAAKSNEILTAVVQGARKEEPSHEVQHAAIQALYNSLEFIRDNFEREGERNYIMQVVCEATQSPSVPVQVGAFECLVQIMHLYYEKMDFYMERALFGLTIMGMKHAEEPVALQAIEFWSTVCEEEIELTAQAQDALQYGDHPEIESKGFAKAALNDILPVLLELLSQQNEDDDEDDWTKSMAAAACLQLLAQNIGDEIVGPVVPFVEAGITRQDWQHREAAVMAFGSILDGPDPMTLAPLVTQALGALISMMQSDPSLQVRDTVAWTLSKITETMLEVIDPSIHLRNFITALVMGLNASPRTCNSCCAALNNLVMQISQPPELLTEEVQTTVMSEYYSGILKELMPIAERPSNQSNSRSAAVQTIATFLSFSANDTLPVVQEVAVAFIARQEALMGMHNQLVGMDDRNNWNDMQINNCVAIAAFIRRSPALAAPFADRIMTNLIQLISASGKQSGVLEEAFSTIGGLASALEAGFNKYMEAFAPYIITALGSHEDYSVAQAGVFITSDIARSVNEGLQPYAESLMSSLIELLRSPIVARQVKPHAISAIGEVALAIGSGFKPFLEATMAILSQAGSTSAPPGDEAMMDFVQTMRESIVDAFIGIMNGFKDSEAGVMLPYAPGILSFLQTCWADEDRSEGFCSASLGLIGDFASAFKNNIKDQITQNWIQEAITSGRSRSASKQSKTNAAYAQHAIKELLK

SEQ ID NO: 3321 - protein, 889 aa, Cryptococcus neoformans
  MISC_FEATURE (321)..(321): Xaa = any amino acid
MPLQRAVSDSHALVSFRANDDPQHVFPAPREGQGNFFFSARCTFQQHRLILLLDQLPVPKNLLFIENDVPPSTTPSAATTPTDHELDPLAHAGDKAELLTQALHESQVPTKPKSPPNNVSRLGKLGQLETRLPDINAEPNEYYGGAQVTSRARTFSNVSLVSCSWTNQLIHNRSVSRVNSSVGLCKWAVRKSLEIADFRMVSTTLMAYADNEDESTPSAPRRYLIDVEETMRLVLEQEDTDNNFQISIYDSGPKLLSLGTASSNAHKTFDIRGTYMLSNLLQELALARDYGRKRIVLDEARLAENPVDRLSRMIKNSFWNXLTRRIDAEGLEIACADPKNRSQHMRARIYIPHGEDEMAEHYRQIAKEKPNLKLEVDILPKECDNPAFVKTLNDKPGILALAMDKKVDADGKSHLEALPFIVPGARFNEKYGWDSYFMALGLLVDGRVDLAKSIVEHCIFEIKYYNKVLNGNRSYYLCRSQPPFLTDFALQIYNQLDRSKPAENKAWLKRTIQAAIKEYHRYWMQEPSLDLVTGLSRYRPSGLGIPPETEASHFTHILQPYAQKIGISVNEYIDGYNDGTIKEPELDEYFLHDRGVRESGHDTSYRLDRKCADLATVDLNSLLYKYEFDIASAIQVAFDDELYLDEEFELSPWPITAEAFKAGATYQLSTKTPQTSRHWFERAAKRKATMDELCWNDGQGMYFDYDTKLRKQTRYESVTTLWPLWAGSASEEQALKLVRNALPKFEVAGGLVSGTEESRGVISLDRPNRQWDYPYGWPPHQIMAWVGLERYGFVDDASRLAYRWIYMMTLSFMDFNGIVPEKFDVVELSHMVDAEYGNQGTDFRYVPREGFGWMNAAYQIGLQCLSTGMRRAVAACVPVSVLATNQWLS

SEQ ID NO: 3322 - protein, 949 aa, Cryptococcus neoformans
  MISC_FEATURE (613)..(613): Xaa = any amino acid
MVKSYMRHGPTQVKLNSNSSYNGRLAYVPGWEDVLVWDTKRGEMVAMWHSTGLTSPVTYLIPAPTPYTSTSTTPVTFAVSYQDGSIRLWSYDPSTPDVEASETVTFNGHKKSVTTMTWDYDASRLASGGTEGEIVVWDRIGEVGLFRLKGHRAPITGLAFIPHPRGGHPGWLVSTSRDTYLKVWDLGTQHCVQTVVVGRGEVTSLAEIKGRWTVVTGSGDGEAKVYTIEKSQLARGMAEDEKGELPALITSVCTLPLPSSTHPISQITWHPALPLLSLQTSDRGVAILRLRTEEEVSAKRARRKKRDREKKKKGKGDKQKEEDKQKEEDKEEDEKDEPVKWEERVAVWCMYSRHAHQLQLLLALSNNSIESYTIPTPGSKSKLADGTTPEPTKTHSIELPGHRQDIRTISISSDDQVIASASSGTLKLWNARTTACIRTMECGYALCSTFLPGDRHVVIGTKGGELMLYDVAASSLLKTYKAHTGPVWSVSVRPDGRGLVSGSADKDVKFWDFEMREEGEGEKVTKQLALVHVRTLKMTDDILCLKYSPNGRFLAIALLDSTVKIFFSDTLKFFLSLYGHKLPVLSLDISLDSKLLVTCSADKNVKIWGLDFXDCHKSIFAHDEAVMGVMFEKEAGSHNFWTVGKDRMVKYWDGDKFELIQKLSGHHGEIWALSTSQSGQFVVTGSHDKSIRIWEKTDEPLFLEEEREKEIEAMYDSNLADTLNREPGEGEGEGDEAEAVQKQTAETLIAGEKIMEAIELADADRAATRQWQVDNAKSNIEIPRPPRNAELIARGDLEPDEYVLKVVQKLPAAQMEDALLVLPFRMVVSLMGYLDEWAMQVRTTYLSSKTEIILVSRILFFLLRTHSSQIVSNRIMRTPLLTLRHHLRDALAQQRDVMGYNLAALKFLKGRWEGERVAGLYEQEGLDEEAVRKRLEEGRGKRKRIEVRA

SEQ ID NO: 3323 - protein, 920 aa, Cryptococcus neoformans
MQPWSMSMCSYRAKLSFYLLARTIETVEGGGIVVLLLKTMSSLKQLYAMAMDVHSRYRTDAHQFVQPRFNERFILSLGSNPDCLVLDDELNVLPLSKGKDIQIGKAGEEDDRGRKRKAEELKEMKENLEGVDIVGSLAKLAKTVDQAKAILTFVEAISEKNLSSTVALTAGRGRGKSAALGLAIGAALAHDYSNIFVTSPDPENLKTLFEFVFKALDALGYEEHIDYDVVQSTNPDFKKAIVRVNIFRGHRQTIQYISPEDSHVLGQAELVIIDEAAAIPLPLVRKLIGPYLVFMASTINGYEGTGRSLSIKLIQQLREQTRPSITKDSENAAASSAGSSSKAAAAGRSGAGLVRSLREIKLDEPIRYSPGDNVEKWLNNLLCLDATIVSKSIQGCPHPSKCELYYVNRDTLFSYHPASEVFLQRMMALYVASHYKNSPNDLQMLSDAPAHHLFVLLPPIDENDNTLPDPLVVLQVALEGNISREAILKEMAQSGMRSSGDMIPWIISTQFQDNDFATLSGARVVRIATHPDYARMGYGSRAMEALESFYNGTSYNFDDVPVDMGESFADAAKVGPVSDNANLQNDTIAIRDPSRMPPLLQRLSERKPETLDYLGVSFGLTRDLLRFWKKGGFTPLYASQKENALTGEYTFVMLKVLASAGGGGEWLGAFAQDFRQRFMNLLSYEAFKKFDASIALSILESTVPRNSPSPAPKLLTNTELSSLLTPFDIKRLESYADSMLDYHVVLDLVPTIASLFFGKRLETSLPPAQQAILLALGLQRKNVEALENELGITSTQTLALFGKVLRKMTKSLEDIRKASIASELPAEPTLAGRSANGSNKFVALQQTIEQDLADSAVQLNGEDDDASKKEQRELLNTLNMEEFAIDQGGDWTEAEKQVERLASGKGHETVQHSQRKSGQA

SEQ ID NO: 3324 - protein, 1011 aa, Cryptococcus neoformans
MSEVSPQSQYGGEPDKPTTKSSSWLRNLSRSNLAALILFYVASLHVIGLYVFTQGFLLSRLAIPHVSPAYNVSNPSPISATHSKAVIIVIDALRTDFISPYHPQPPSPHHHGVLSLPAELTQSRPEHSLIFNSFSDPPTSTMQRIKGITTGSLPTFIDIGSNFASAAIEEDSLVSQLVAANKRVGFMGDDTWMNLFPSSFHPNMSHPYDSFNVEDLHTVDNSVITHLFPYLHPSNQSQWDVLIGHFLGVDHVGHRVGPHRDTMTEKLTQMNEVLEKVVDLIDEETLLVVLGDHGMDDKGNHGGDSEMETSSALWLYSKGPMLTNPATTSAIFKSLPTYIFPKSTMPLRQINQIDIVPTLALLLGVPIPYNNLGSVIPECFTNNLETLEVAQRVTADGIWRYVEAYGDKEVKENLNSAWRHAQSQYQKDNLSASIIAHRAFSLDALVHLRSLWAQFSMPLIVIGSLILGLCALTLIALYVGVRNNGVNWDVYARLALETATMGSTVLASIAGTVAGVYTARPIVAIKVFIVAAALISEVILILPLFVKSSLSLALPLPTSFSINRHIGPFILIVHALSFASNSFIMWEDRVVLYLISTIPIIYIIRALSAPTADMRLKIIFLSLAFTILSRLAGTITICREEQQPYCSVTFFSGVTATAPTWALIAIVPLALQIPRAIGITLSRSKSLAGPAPFILGILWRAVLVANSVYWVLEFFESFDGLNPARIPLVNFLKLWLARCSAGASLGAIPYVWLTSPLCISVERTTDQATGEEEVTVFGFANAFGSTYILYTLAPFALIHLVSQPMAQFTLTAFLIGLLVYLELNNNNASSPAGLASFDPADTAQTIVRPSFTDVVPIALSGFLTFFATGHQAVISSIQWKSAFVGFSTASYLFSPVLVVLNTWGGFFLSAIAVPLLAIWNIAPRPRESIPTLAHALQVTLAFLVYHTVVAFASAITAAWLRRHLMVWKVFAPRFMMAGVTLLVVDVGLALGLFGVRVTGWKVKKTFGCESI

SEQ ID NO: 3325 - protein, 964 aa, Cryptococcus neoformans
  MISC_FEATURE (384)..(384): Xaa = any amino acid
MATNAPCYTIVHDDLLDSPSTNDLRNALQKGSDEVKLETMRTIIVGTLNGQSYASLLMPIIQYVMPSRSKQLKKMLHFYWEVCPKLDENGKLKQEMILVVNAIRNDLQHPNEYIRGATLRYLQKVRESELLEPLVPTVRQCLEHRHSFVRKNAVFAVYTIYQDHEHLIPDAPELLDTFLAAESDSTCKRNAFVTLCNISQPTAVQYLLNNFDQIESMDELMQMAVIELVRKEARSEGGHRAKWIRCIFELLNSKSHAVKYEAATSLTTLTQNPAAVKAAAAALAELIVKEADNNVKLIVLDRFNNLRAKHENVLDGMVMDILKVLSSPDMEVKRKAIGVALEMVSSRNVEEVVLFLKKQLQGTLDQDFDKASCHDLTISLSNTXQNLEYRQLLIQSIHSCAIRFSEVAANVVYVLMDFLGDSNNPSAVDVIAFVREVVEKFPKLRTAITEKLISTFGEIKSGKVFRGAMWIVGEYCEQPEDIKQAIAAIQKVLGEIPILASEQRLLDEAEAADETPAEQQEQPKAITTTRVLADGTYATETVYTSSASAARLEAVRSASKPPLRSLILGGDFFTGSVLASTLTKLVLRYSEVTSSDQQSINILRAQAILIMTSVIRVGQSKFAAVPIDEDAEERIMNCIETLAELQGSKALHQVFLKDTKAAYAKMVATEEKKALEKKERESKVSVVQADDLISFRQLSKKSVVGDVDEVSAATGSIHPQDDFVSKLSRITQLTGFSDPVYAETVVTLSQYDIILDVLLVNTTNETLQNLMVDFATLGDLKLVERPAPFTLAPHGFHSLSATVKVSSTETGVIFGAITYSKQGASDADVTIVMSDIHVDIMSFIKPNYVNEAQFRSMWTEFEWENKVAVQTSISDLRAYLDHLLKSTHMALLTPEAALSGDCDFLSANLAAKSLFGEDALANASIERTEDGHITGHVRIRSKTQGIALSLGDKITLSQKALATA

SEQ ID NO: 3326 - protein, 984 aa, Cryptococcus neoformans
MAGDRERPLPPPPPGAEQDSAKKPETKNYSQLDLLRYDAPLTGAKITRMLNQLQFKLQVEEQYKTGIEKMAQAYRAEGDKRLKSETDAKKSESEGKIQLLRKAKKRYESLAKFGGAVEDDEDLMSDGKRKEALRKPISGKLVISLRSARDLNHRALPRRSSKTYSETTVVIKVEGNERAVSHPSRNDKWHEDFHIPVEKANEVEITIYDTVAPGDSAPIGMLWLRVSDLVEALRRQKVGIEGQGAGWVTAATAATMGPRSSGNAPDSVTLHSAGTLRGKPDAEGKGPDGIDGWWSVEPAGAISLRMDFVKDTVAGARRPYEALGRQGAVRMRKGDVYEMNGHKFVQRQFYQPIMCALCQEFLLTGEGYQCEDCRYACHKKCYPKVVTKCISKSNADGGDEEKINHRIPHRFTPYTNMSANWCCHCGYMLPFGRKNAVKCSECALTCHQTCSHLVPDFCGMTMEMANLLLKNLRDIKTTQHRKPVPSTSTSSSVSTLPSYHSQESRSHPVQSAALQQPAPSSRPPAGALPSTDQRPIQPQVQNQQTGAYDNLRPAGGRAMPQLPPVAVPSNKISFEGDRLQEPHGQIPPVMPAAQPQPQTLPPSAQSVQSPVKPQYVPQPAVQQQVAQRLPPQQPLMARKRKVGLDDFNFLAVLGKGNFGKVMLAEEKTSSNLYAIKVLKKEFIIENDEVESTQSEKRVFLAAAQERHPFLLGLHSCFQTETRVYFVMEYISGGDLMLHIQKKQFTLRQAKFYACEVLLALQYFHSKGIIYRDLKLDNILLTLDGHVKVADYGLCKEEMWFGKTTSTFCGTPEFMAPEILLEQRYGRAVDWWAFGVLTYEMLLGQSPFRGEDEDEIFDAILEDEPLYPITMPRDAVSLLQRLLTRDPTRRLGAGEGDAEEIKQHLFFRDVNFDDVYHKRIPPPYFPVIGNATDTSNFDQEFTREQPTLTPVHTQLSEADQKEFAGFSWVGVFSLTIDRIYTDPTT

SEQ ID NO: 3327 - protein, 1014 aa, Cryptococcus neoformans
  MISC_FEATURE (729)..(729): Xaa = any amino acid
MLSSRKFLADSDYQALNDKKSQSAREGACEVISTLCENGAAQLLEPHVISSAENTPFPALLEAFADKVAAVKTAAIAAVKAIVQSMNPWASFVLLPALLNLIRTSGKWQIKAGSLEILQQLITSAPYQMGEAMPDLVPVLAGAVWDTKSDVKKAAKATLEKAVSLVENKDIEKFVPALVKSLLNPIEEVPKTISLLSATTFVSEVTAPTISLIAPLLIRGLDERPTATKRKVCVIADNMSKLVDSEYTVRPFLPQLLPRLIKTAETIADPEARSVANRAIVTLRRIGKVPVESDGSDLPPLPVAEGPHLATNFVALVKKHGGVSVEQTNPGLAYAGVLAASLVNHHNFDQKTWESTLPPYLKLALPSYDSLPAVRELLQKKADEAETDDAKFPDEEEGEDLCNIEQFNLAYGAKILLHHANMRLKRGHRYGLCGRNGSGKSTLMNAIINNQVEGFPPPTEVRTFYVQHDIDGSEAEISILDWVLSDKRLLATPEEIKSTLESVGFDEVKQKNSIGSLSGGWKMKLALARAILFKADILLLDEPTNHLDVLNVDWLINYLTSLTRCTSIIVSHDSDFLNRTVTDVLHLNNFKLKRYPGNLEEFVKHVPEAKSYYQLDVAEDYQFKLPNPPLLDGVKTKEKSLLKMRNVSFQYPGSSIQQLYDISLQVSLSSRVAVLGPNGSGKSTLVKLLTGETEPNLGGQVWKHPNLVIGYVAQHAFHHIDNHLDSTPXEYMLWRYQTGEDLEEMHKANRVMTEAELAKMKEGATVIKDGVKRIIDELVARKKLKQSYEYEVSFKGMSSAENIWISRDELVARGFEKKVMELDTREAQRLGLMRPLVRREIEKHFEDFGLDAEFVSHNSMRGLSGGQKVKVVLGAATWRRPHIICLDEPTNYLDRESLAALIAALKNFEGGVLIITHNREFSESICTEVWAMREGHLEASGHNWVEGQGSGERIDKKAGDDDEVEYDALGNPIVKAKKEKKLSAADKRKAKKDRMARRKRGEEVFSDEELSFLL

SEQ ID NO: 3328 - protein, 997 aa, Cryptococcus neoformans
  MISC_FEATURE (680)..(680): Xaa = any amino acid
  MISC_FEATURE (803)..(803): Xaa = any amino acid
MARQSKPFTASTVSQEKPKKQVIKKKRLDPANAYTYLPSLPKRHRTSAFQNSLSYEELQQAKESSKGRHYDGEDDEESMQARVRKVAMMIASEGPQEVDSEESEVDSDEAWESDGSDEERWGDVFKELEKGKGKKKAKDVVRKLLQPAKPLTVNLDESDGEAPKEIANNSTVPISPESAEEDEDNDDDEDEDEDDDEDEDEDEDEDEDEDEDGLSELSAEEEDPDTLADLDAFVDQLAASDKKRKATETDADSSAEQKKRRVLPVKFRQEIKDDAALKSILKGGVLAAPLPTVQQERLDREAAYAQTKTEGQKWSTLMKRVKEAEHLSFPLQAKDRGGVKSSSEILAGFKPQNEMESAVEALLKKANLTEDELTKHEDLQMEAREMTEEEIKARRAELRYQRELLFRAEAKAKRVAKIKSKTFRKLARKRAAKENPGMALEDLERLDPEAAQIEREKIERERAKERATLRHGAKSRWARGVGGEADDDERMAKEAMLDMKEKLLRKIQGKDEGSSSEEESEDEEEDEETVKAKAFDQLAQLNSDSGAASQAQGKKGLMQMKFMQKAQERRMKEVAEQEKDARMQIELFGEDGEREEESSNESDEEPAVVNVGGNEGRLKFSGPTPGVSYLAQAHVVQRTDTPLHRPALPNHQLFLLLQSKTPSPHPNPNPSLPVPLLPLXDSNPWLTATNSSGPSRKRHAQLGSQLNDETKAVKAIKKASKRREDEEEDERVDIDGKTSIAAIAAVQADEQEEDEEIADLLPASGVKAFKQRDLVAEAFAGDNVVEDFATEKARQIEADASKXEDTSLPGWGSWGGKGAKKRKANPKFLVKTAGIEPIARKDFAHSNVIITEKKDRKASQFQLKDLPYPYTSKEQYEKSFEVPVGSEWNSRSGFQRGTLPRVVKKASSAHDIGFTRKADNSYSLEPLSNLSGDCSRLRILCNVLCALLMFSMHSSSLLCQVFAVCFLYTLSRQPFFGLDNFTPLAPCSFITDTINLI

SEQ ID NO: 3329 - protein, 1008 aa, Cryptococcus neoformans
MFIALSMFASLCADYILGSPPSRTRCRVRRSPLLLLVSFVAVTIIVCRRLTAASEADEEPRKKREYKEMEHKTEGDLHAKVDMNTIQFTAADLYDKDKVDIEHVVMEEVYQLLQCTDAGLTEAEATDRIGIFGPNKLEEKSENVLLQFLSFMWNPLSWVMEGAALVAIALSNGGGTPPDWQDFVGIILLLFVNSTIGFVEERNAGNAVKALMDSLAPKARVKRDGQWKEIESSELVPGDLIAFKHGDVCPSDCRLVEAIDVSMDQAALTGESLPVGKHEGDECFSGSTCKQGEAEGIVIATGPNTFFGRAATLVGQDNDQVGHLQQVLARIGTFCLVSIGIFVLLEILILYADFRYPYRRGLDNILVLLIGGIPIAMPTVLSVTLAVGAQQLAKHKAIVTRITAIEELAGVTILCSDKTGTLTTNKLTIDKENVKCYSKWDVEGVCLLAAYASRTENQDAIDGCVVGTLPDPQQARAGIKLLDFKPFNPVDKRTEITYRDEMDGGKLKRATKGMTGIIIEICTRNKTNELEDQLEADVEEFARRGLRALAVAFEDVAGDDPSAEGNGFELVGLLSIFDPPRSDTKKTIDDAMALGVKVKMVTGDQLAIAKETGRRLGLGDHMYPAKVLKEGPEAGSKHANLDEMIMDADGFAGVFPEHKFEIVKRIQNLGHLCAMTGDGANDAPALSRANVGIAVEGATDAARGAADIVLTEPGLSTIVHAIYGSRVIFQRMRNYAIYACAVTIRIVLCFAIMAFAWRFDFPPFMVLIIAVLNDGTIMTLSLDRVLPSTTPDSWDLAEVFSFGVAYGVYLSASTIALYATMENTTFFEDRFGVEPLKGNSYGGHMVIYLQVAIISQALIFVTRSHGPSWTERPSVALMLAFCLAQLVSSIIAAYADWSFSQVHSVSGGWIGIVWIWNIVWYFPLDGIKFIMEDRYRCSPEEEGPKGRPCRRRCRPPPSSFSTRVSLLQPNQLPYPSCQPTQGWCQDLYVSERASTVSFRVWIVHLSGY

SEQ ID NO: 3330 - protein, 971 aa, Cryptococcus neoformans
MQATPETLSLLTNYLSSTVSPDAHTRRSAEESLRQAEGQQGFLLLVLELVKADSVNMIVRQAGGVYFKNTVKRLWSGDEETQIDPADKAAIKSQLVPMMIALGTPQTSRLQSQIGEGLSHIASLDFPREWEGLCDELVNSLTPDNFVINNGVLATAHSIFKRWRSQFRTNELYSEINFVLSRFCEPYYRLFQHVDQLLQTPPASLPTNSSILLLGQSLLLLIQLFHDLSSQDLPPFFEDHMTEFMGGDQPGWLRKYLDWEVEELKGDDDDEAPGPLQKIRSSICEIAELYAQKYSDVFTQLGSFVDGVWNMLTRVGTSTREDVLVSRALRFLSVVVKMGNHRAMFAASETLNAFCEKIILPNMAIREHEEEMFEDDPMEYIRRDLEPSTESDTRRQAATDFTRALMELFEKEVTGIIKGYISVFLQEYNKNPVGNWKSKDTAIYLLTSIASRGSTQQLGVTSTNVLVDVVDFFGQNVFSDLQAAPGSVHPILTVDAIKFLYTFRNQLTKDQLVSVLPLLVQHLASDNYVISSYAAITIERILFIKNLTKMVIRFTQADIRPFAENILMALFANIEKGGTPEKIAENDYLMKCVMRVIITARTSLTPSHEGILTRLVNIMGEISKNPSNPKFNQYCFESVSALIRFVCEGTPAALPTFENALFGPAQHILTNDVAEFIPYIFQILAQLLELHSPSELPPAYQALTGPLLSAALWEQRGNIPALVRIWKALLLRGAPSIVAAGQVQGLLGIFQRLAGSKVNDVWAFELVQALYEFVPIEVMRPFSQTVFVLLLNRLQGKPSTQFNHCFVYFFAFLANLDSVGADFLVGVLEGIQTGLFGNLLTGVILSNTQKITARNRKLVEVGLIKTLSRSDSLLVEPNRQFWPPIFLALLDMFTLPQDITYANPEGSGDITELDPEEAGFQSSFSKLGASEKTVSDPTAGVEDSKVFAAKELAKRSNEKPGMVCGMSSHDT

SEQ ID NO: 3331 - protein, 998 aa, Cryptococcus neoformans
MPVPAVTTSAAGSLTLLEDPDKDVRVYALNHLLSIVGQFWAEMSDKLPYLELLADPLSKELAPENRPFAALLISKIYFYMGFQDEAVEFALKAGVAFEKESEGEYRETIIAGCLDQAIDKTQKGEDIPADLQSIVDSVLRSSSGENAKLVRLDLAMGLALSLRRLDLIEMIYLSSRGPSQASSSKSERVVHDENLLRYVLAEVVSGTSGNEAWPEDFRANLFSLLRRLFHLNPNPDWNSITTVWAQSSDVESTVESLVKLLEVDDNLTVYQIAFDLTEVASQAFIDEVREKLGETKWAAPVDGSVSFLNNILRGDTSAELFLNFLSRNNKTDMSILKVTKETLEDRYSIYHSAITFTNAFAHCGTTSDKFLRENLDWLGRASNWAKFSTTAALGLIHRGSWVNGNRVVKPYLPGGAAPNKYSEGGALFALGLIYAGRVEFAEEELKKGLAEGNDPLVQHGAALGMGVSALASADDEIYDEIRPILFQDDAVAGEAAGYAMGLVMLGTASERALEEMLSYARETQHEKIIRGLAMGIAFLMYGQREAANPVIQRLTEDKDAILRYGGMYTIALAFAGTGNNKAVKKLLHVAVSDVNDDVRRAAVTALGFVLFRNHTTVPRVVQLLAESYNPHVRYGATLALGISCAATGLESAIELLEPMTKDPVDYVRQGAYISLAMILIQQSEAACPKSITIRELFAKVVADKHEDPMARFGASLAQGIIDAGGRNLTLALSTRAGTLNQNAVVGMALFVQFWYWFPLAHGLGLAFTPTAVIAIDGKMKVPQLELECHARPSLYAYPATEKKVEEKKKDKQKAAVLSTTARAKARERVKKAEAGEVMETDDKAEESGKGKDAAPTPKKSKPSEPSSFKIPNMSRVTPSQLAYVTFPTSGRYTPVRPLDHSPLSGSNINGKPSTLASGASASGSIVVLRDEKPEEPAEYIELSKELAWMAAGKPRSGSSYFGAGYRRRVWWGAGFGCYWASSTTTARARGGGRGPTSV

SEQ ID NO: 3332 - protein, 989 aa, Cryptococcus neoformans
MFLALLQSDESAMKHHCSSLRGSSGGSTPRRARRGDIHSSFPHSSPSLARRQAQVPADSLSLRASSPGMGTDSFGTPRVFGSAAPTLSAVAQSQLGADGDDIDGMVKFIWGTTISLQESMNLFRDFLRGFKPKYRAVYNAEQSRHAEESGGVAPPPMTLYDNLSAERAEVPLYETYLNRLRLTGETNLNLDALNLLAYRPTKKLYQQLVNYPQEVIPIMDQVLRDVMIELGHEELEKAQTKFAEGNLSQDVESRVYKVRPFGGEKTVNMRDLNPGDTDKLVTVKGLVIRATPVIPDMTTAFFRCLVCQHTVQADIDRGRISEPERCPRDVCGSTGTMSLIHNRSEFTDKQVIRLQETPDAVPDGQTPHTVSLCVYDELVDLVKPGDRVIITGIFRSIPVRVNPRQRSIKSLYKTYLDVVHVKRTNTARMGFDPSTRAGESKPPGDLGSPVRSAAAEMEQRIIELSNHPDLYNILASSLAPSIYELEDVKKGILLQLFGGTNKSIARGGGGGGPRYRGDINVLMVGDPGTSKSQILQYVHKIAPRGVYTSGKGSSAVGLTAYVTRDPDSKQLVLESGALVLSDGGVCCIDEFDKMSDATRSVLHEVMEQQTVSIAKAGIITTLNARTSILAAANPINSRYDPNLPIPANIDLPPTLISRFDLLYLVLDKVDEVNDRKLAKHLVGLYLSDVEDQPADNIIPLQTLTSYITYARSKIHPVLTEGASEALVQAYVEMRKAGMDSRTQEKRITATTRQLESMIRLGEAHARMRLSDRVEEEDIREAVRLIKSALRESATDPLTGQIDLDLINTGAGQTMRRARADLKREVIKLVVEKARSQGIRWAAVIDELNKQSSVPVDHAQFAEIVRELEEESIVKVMGERERRIIKSLGVITLENGFSFIFFVVWCLSLFFCLVQCLHNINEKLVLHLGLQSLLFFKGRNNKYWISSSAISRKTFRSGLTKVRKESAIHHRSIAYCRHVGCRSCKCDCEE

SEQ ID NO: 3333 - protein, 956 aa, Cryptococcus neoformans
  MISC_FEATURE (236)..(236): Xaa = any amino acid
MYTIGYGVVCLIGMQHDNNPSCLKTASLDLSLLPFLLPSNPQSSTEYFKNGNYTDIVLKPTLTRPQGVPALFRWLSKKYPKIVERVKEDTPKKIRGPDGEIVEEPIRYENPNPNGFEVDNLYLDMNGIVHPCTHPEGRPAPETEEEMMVEIFKYTERVVNMCRPRKVLMMAIDGVAPRAKMNQQRSRRFRAAQEAADKEEERREAIKLFEAMGHAVSEETANHKSWDTNAITPGTXFMDLLSISLKYWVSHKLTTDPGWKDLKIILSDSSVPGEGEHKIMDWIRRQRSYPTWDANTSHVIYGLDADLIMLSLATHEPHFRVLREDVFAQSSKGPHACKNCGKVGHIAANCKSDKKFKDPNVAEVAKTEDPKPFIFLDVACLREYLAVELVVPGMPFPFDLELAIDDWIFMIFFVGNDFLPHLPSLEIREGAIDVLLKIWRAELPRMGGYLTNHGKVNLDRAQVILEGLAKSEDEIFQKRKDDEERQEHSQKRRRIEEHKRQDEDKAREEDRNTLTLNGTEYVADQDQKAKKAMAGSNSDIVKNRKAIRMANMSAAQALKAELEGGNDVNVDDKKAIAQEGKEEDEAVVTVERTEDEEKEQLTKEEARGTLEEQGEKEDGTVDYEDDVKLWEPGYRERYYEKKFGVKLSEREFIDKVTKSYMEGLCWVLEYYYQGVPAWDWFYPYHYAPFAQDFRDVGSMDIKFETSIPFKPFAQLLGVFPAASRIHLPEPLQTLMIDEDSPILDFYPPDFEIDMNGKKMAWQGVALLPFIDQNRLLTALKSKEELLSDDEKRRNSWGDNVMFIANENPLYDLFCDKLYGLRAKDVSKVTSYGITGSVLPDPNCVPASTFDTPIPSISECPDLNPNDSISVRYYFPRQAHPHRSILLRGYKPEPARLTESDKDGPTWWSRWKKRSQAQRRWKRKCDRWTGYGKRQVREWAATDQWLPTASASVELWG

SEQ ID NO: 3334 - protein, 1005 aa, Cryptococcus neoformans
MAAPMQVDEAVPGDSKGLYSRQLWVMISSVPIKMATSNVLIVGMKGLGVEIAKNVALAGVKTVTIYDPSAVEIADLGTQFFLREEDIGRPRAEVTAPRLAELNSYVPIKILPGAGEITPEMIEPYQIVVLTNATVRKQVEIDEYCRQKGIYFIAADVRGLFGSVFNDFGKDFACVDPTGENPLSGMIVEIDEDAIVTCLDETRHGLEDGDFVTFSEIKGMEGLNGCEPRKISVKGPYTFSIGDTRGLGKYKSGGLFTQVKMPKILQFKTLKESLTNPEFFITDFAKWDRPAALHVGFQALSAFYEKAGHLPRPRNAADAEQVISLAKEIHSAAGGEDVLDEKILTELSYQATGDLSPMVAVIGGFVAQEVLKACSAKFHPMQQNMYFDSLESLPATLPSEADVQPLGSRYDGQIAVFGKAFQEKISNTREFLVGSGAIGCEMLKNWSMMGLATGPNGIIHVTDLDTIEKSNLNRQFLFRAKDVGKFKAESAAAAVADMNPNLKGKIIAHDDRVGPETENVYGDEFFANLDGVTNALDNVSARQYMDRRCVFYCKPLLESGTLGTKANTQVVVPHLTESYSSSQDPPEKSIPSCTVKNFPNAIEHTIQWAREAFDSFFVNPPTTVNLYLSQPDFVETTLKSSGQHHEHLKQIEKYLVKERPMSFEECIMWARLQYENNYVNEIKQLLFNLPKDQVNANGTPFWSGPKRAPTALAFNIDDPLDMEYLIAAANLHAFNYGLKGERDPALFRKVVESMNVPEFTPKSGVKIQINENEPVENNDIDEDDIEAIVSSLPPPASLAGFRLQPVDFEKDDDSNHHIDFITAASNLRARNYGITLADRHKTKLIAGKIIPAIATTTALAVGLVCLELYKLIDGKNKLEDYKNGFVNLALPFFGFSEPIAAAKQKYGETEWTLWDRFEIEGNPTLQQFLEWFQENHKLEVQMVSQGVSMLWSSFAADRMRMRMSELVEHVGKKPIPPHVKNLLVEVMVNDENDEDVEVPYVLVHI

SEQ ID NO: 3335 - protein, 1065 aa, Cryptococcus neoformans
  MISC_FEATURE (889)..(889): Xaa = any amino acid
MSSSAPSDPPLSASSLTVKHKKRSSKDKSGTPSPRPSKTARLDQEDGADDPMDVLEEGKDGRSRDPMEALEDGAMPKVEDEYEVQAEREVDAAKDFADVTAPGQEAKLKLVHQVRHQVAIPPDYPYIPINQHKRKDPPARTYKFELDPFQFVSTSCIERNESVLVSAHTSAGKTVVAEFAIATCLKEGRRVVYTSPIKALSNQKFREFTETFGDVGLMTGDVTINPEASCLVMTTEILRSMLYRGSEVMREVAWVIFDEVHYMRDKERGVVWEETIILLPHTVRYVFLSATIPNSMEFAEWICATHEQPCHVVYTDFRPTPLQHYLFPAGSEGIYLVVDEKSNFRDDNFQKAMAALAQGQGEDPANPSGGKGKKGKTKKGGALKGETSDIYKIVQLIMRRNLNPVIIFAFSKRECEDLAMQMQKFDFNTPDEAATVAQVFESAIGSLSEDDKKLSQIEGILPLLKRGIGIHHGGLLPILKEVIEILFQEGLIKALFATETFSIGLNMPAKTVVFTSVRKFDGKDFRNLSGGEYIQMSGRAGRRGLDARGIVIMMCDEKIEPEAAKGMVKGQADRLDSAFHLGYNMIINLMRVEGVSPEYMLEKCFFQFQNSMSVPVLEKQLKEAEAERDAIVIEREDEIEEYYELRQQLKERGQDFQAVITHPAYCLRFLQAGRLVEIRDGDKDFGWGVVVAFNKVVNQRGRPPIWTDQDPPQKQYIVDVLTRVETGASIPRDRSASEISPPSGADKGEVAIIACSLSTVQSISQYRVNLPKDLRGQQEKNTAFRAVNEIKKRMPDGPPLLDPIKSMGISDKSFVDLVKKIALLENRLQTLEITKSPELPRLYDLYDRKQKSIQSVKSLKRRINSVHDILQLEELKSRKRVLRRLGFYXADDVVEMKGRVACEISTGDELMLTEMMFGGTFGTLAPEQCAALLSCFVFQEKSEAKVRLKEELAVPLRTLQETAKRIAKVSNESGIAIVEDEYVQSFKVEMMDVVLQWCKGAKFSQICEMTDVFEGSIIRCFRRLQELIRQMGQAAHAIGNTELEEKFAKSMELLERPNTVVFNPS

SEQ ID NO: 3336 - protein, 1068 aa, Cryptococcus neoformans
MFPAVFSCSSTVQNVTIVAHVDHGKTSFADSLLSSNNIISSRMAGKLRFLDSREDEQERGITMESSAVSLRFDMTRLSPDGTSSIQQCICNVIDTPGHVDFASEVSTASRLCDGALVLVDVWEGVATQTIAVLRQAWMDKLKPLLVINKMDRLITELKLSPSEAYHHISQLIEQVNAVMGSFYASERMEDDLRWREEREKRLAARKEQQGEDLDDDEEYEEKEDEDIYFAPDRGNVLFASAIDGWAFRLGKFARLYAEKLKIKEGNLRRVLWGDWYLDPKTKRVVGRKKLAGRNLKPMFVQFVLENIWRVYDTVLNEYNPDAVQKIVTALNIRITPRDLRSKDTRNLLNLIMQQWLPLSTATFQSIIEVIPPPPSAQAIRLPYMLHPEKAKAAAASGGLKAENELERGLYECDQGEGAEVVAYVSKMFAVRKGDLPEYKPKEMTAEEMRARGREERERRAALVAERQAKGEGLDGQPLPEDLAKPLESLSLENIQPATSEKPAVDDSDSEVLLGFSRIFSSTLHRGTSLLAILPKFDSSLPPSHPHNIKHTVPIIASDLYMMMGRELVSVDSVPAGHVCAIGGLNRAVPRSATLWAPDAKGVEEGFGKEALVNLAGVGVGANAIVRVALEPENPSDMPKLIRGLRILNQADPCAEYFVQESGEHVIITAGELHLERCLKDLRERFAKCPIQQSAPIVPFRETAVKAPDMAPPKTTGAPRGTINGTVINGLVKFRLRAMPLPEGVETFLLSQQGAISKMLVRERDGKEARQLSPEEFWTELERLLNKAGGDWAGAADRVWSFGPKRVGANLLLDPVGTKHLRLRRREQLFTQARAQDYESSIETGFQLSTFQGPLCAEPVVGMAWVVESVELDRQGMESEQGKGQVVGGALISAVRDACRQGLLDWSPRIKLAMYTCDIQASTDVLGKVYGVIARRRGRIVSEEMKEGTSFFTIRAMLPVVESFGFADEIRTRTSGAASPQLIFSGYETLDLDPFWVPTTQEELEDLGEKADKANVAKAYVDGVRKRKGMFVERKIVEFAEKQRTLKKNVPSREDKCRRKQSQVEDIVQ

SEQ ID NO: 3337 - protein, 1116 aa, Cryptococcus neoformans
MRLPGLSWSWKRWVYGTKLSQTDKRDYLIDLEKTAQASWAEQHLFETNPPPLPEGVSSYSEFFASGKSMEEVHEKNPKWFGTFPYAYMNGSLHLGHAFTISKVEFAAGFERMRGKRVLFPVGYHATGMPIKAASDKLIREMEMFGEDFARYKEDEPEEVEPAAATAAPAKSLESTDPSKAKKGKLNAKSTGLTYQFQILELIGVPRDELKKFADPSHWLHYFPPIAKQDLSGLGARVDWRRQFITTDANLYYDSFVRWQMNKLYKQNRVKFGKRYTIYSPKDGQPCMDHDRASGEAVNPQEYTAVKMEVLEWGPTVPEGVKKAVEGRKVWMVAATLRPETMYGQTNCFVGPNLKYGLFEASDNELFLVTERSARNMAFQGIFDRPKGACNKVADIIGSDLLGTKVNPPFGLVKEVYVLPMEGVLATKGTGVVTSVPSDSPDDYRTLMDLRKKAEMYKIKPEWAAIDPIPVLRTPKYGDMAAEVLCTELKIQSQRDKDKLAEAKDLTYKEGFYNGVMTVGDFAGTPVSEAKPKVREQMIQAGLACPYAEPESEVISRSADVCVVALVDQWYLDYGEDGWKTQAFKLLNKLNTYQNETRHAFEGVLNWLNQWACARSYGLGSKLPWDPVWLIESLSDSTVYMSYYTVANLLHEDMFGKNPGPLGITPEQMTDEVWEYVLADGQLPADSPVDAEKAAQLKYHFNYFYPLDVRSSGKDLIPNHLTFWVYCHAALFPEKHWPKAVRANGHLMLNGKKMSKSTGNFLTMKEATKKYGSDAMRLTLADAGDDITDANFEETVANAAILRLHTCSSWAEEMKSTKDQLRTGEWNDFDRGFRAEMDALIKEAYGAFEQMEYKRALKAGLYDFENARNWYRMVSDPVNSGSGMHRDLVFAWLRAHVLLITPFTPHYSEHIWKNVLGETSSIQTALFPEPSGPIDPTVLEQTEYLRGVVDAIRSAEAQAGKKKGKKAAAAVYDPSKPKKVRMYVAKNFPEWQEKAIGVIKNQAWDGEKVDDVKLRKGLEEVGLMKDKKVMPFCQAFKRKLAVTGPSAFDRTLPFDELYSLKMLAPLIKSSLRFEEIDVLSVEEAREIIEKDGEKEGWAKEKIEVAEPAVPGVQFWNV

SEQ ID NO: 3338 - protein, 1068 aa, Cryptococcus neoformans
MHPKYKRKAAKMKASKQSGKSDDGQSVMEEQKQLQARKFPGLSMPDQDWKPAEKYVDERAAKEPHETLPESLSTSDTMAQLESIASRRNRPAAEDFLDGEPAAKKLRSATSSGHDGSSGRRGGYEGGSFRDSFRHGRPTVDERPVLYKIYNGTIANITDFGAFVTLDGVERKIDGNQRSNEGKVNSPRDFLKRGQRVKVKVMAVSPKIGLSMKDVDQNTGDDLSTPLLAVDERQRSSAKRLSSPERFEIKQLIASGAVSAADYPDLDEDFSTNVANHEIEEDIDVEVNEVEPAFLSGQTKVTLELSPVKIIKAPDGSLNRSALAGASLAKERRDLKRLEANEQADAETREINQPWLDPMANQNERQFASDIKGNLLGQKAAQMPAWKAANKVVSYGKITSMSIQEQRRSLPIYKLREQLVAAIRDNQILVVVGDTGSGKTTQMAQYLAEEGFLEKGRLGCTQPRKVAAVSVAKRVAEEVGCRLGAEVGYTIRFEDMTSPETKIKYMTDGMLLRELLVDPDCSKYSVIMLDEAHERTIATDVLFGLLKKACKRRPDLKLICTSATLDAAKFATYFWGCPIFTIPGRTYPVETLYTKEPEPDYLEASLITILQIHLMEPAGDVLLFLTGQEEIDTACEVLYERVKALGPQVPELLILPVYAALPSEMQSRIFEPAPPGARKVVIATNIAETSITIDGIYYVIDPGFAKQNAYDPKLGMDSLIVTPISQAQARQRAGRAGRTGPGKCYRLYTEVAYRNEMLPNPIPEIQRTNLASTILTLKAMGINDLISFDFMDPPPAATMLTALEQLYALGALDDEGLLTRIGRKMADFPLDPPLSKMLIKSVDYGCSEEALTIVAMLQAGGQVYYRPKDKQTQADAKKAKFHQPEGDLLTLLAVYNGWKNSKFSNPWCFENFIQTRAMKTAQDVRKQLIGIMDRYKHDLVSCGTNYNRVRMAICSGFFRNAAKKDPTEGYKTLVEGTPVSIHPSSALFQRPPEWCVYYELVLTAKEYMHQVTVIEPKWLSEVAPTFFRIADQNKISKRKASEKIEPLFDRFAADKDDWVCMFWTGDPT

SEQ ID NO: 3339 - protein, 1127 aa, Cryptococcus neoformans
  MISC_FEATURE (383)..(383): Xaa = any amino acid
MAIRRALIGIPRVLELILLQDKWQLLPAFLKVKGLVKQHLDSFNYFVNVDIKAILAANSLVISDINPKYYIRYTDIRVGRPARHDANQVASALSPMECRLTDSTYSAPIYVDVEYMGEEKRSKQRGVQIGMLPVMLRSDLCNLKGKNEAELARMGECPMDPGGYFVVKGTEKVILVQEQLSKNRILVMKDKKDEVMAEVTSSTHDRVVKTYVVSKANRLYLRHNSFKEFIPIVIALKAMGLTADKEILQLICGSDERYQEAFGVSLEEAAKEKTFTRRQALEWIGARVSPNQAKDDSGSNQKLTPSDIAQQALAAMVLGHVPVRNMNFRPKCIYLATMARRVLMAMIDDHMVDDRDYVGNKRLELAGQLLSLLFEDSFKTFNXELKKRMDKILEKPNRAGPFDAGTLIRQGGDPITQAFVRSISTGNWSLKRFHVERAGVTHVLSRLSFIAALGMMTRISSQFEKTRKVSGPRALQPSQWGMLCPSDTPEGEACGLVKNLALMTHITTDVPETPLVKMAFMLGVEDISLVTGNELYRPGVHMVQVNGTLIGVTNMAKRFVRQFRKLRRAGRMSEFVSIFINHHHKIIYIASDGGRICRPMIIVEKGRSRVTTEHVRLLKEGKVTFDHFLRAGLVEYLDVNEENDSFIACYENEIEEGTTHLEIEPFTILGAVAGLIPYPHHNQSPRNTYQCAMGKQAIGAIAYNQLNRIDTLLYLMTYPQQPMVKTKTIELIGYNKLPAGQNATVAVMSYSGYDIEDALILNRASVDRGFGRCHVLKKVTTPMRTFHNGSHERTAYPDPPPRPDAYTFVDKADGMTAPGATINQYDVMIHRETPVDTRGGGADTQLYKPMPVTHKTPEPILVDKVMLTEGEDGALIKILTRQTRRPELGDKFSSRHGQKGVCGLIVPQADMPFNDQGIVPDIIMNPHGFPSRMTVGKMIELLSGKAGVVAGKLQYGTAFGGSKVVDMSQILIDNGFSYGGKDMLTSGITGQPMEAYVYFGPIYYQKLKHMVMDKMHARPTGPRANLTRQPTEGRSKDGGLRLGEMERDCLIGYGATQLLLERLMISSDAFETQVCESCGMLGYNNWCPKCKSGKGVVGLTIPYAAKLLIQELMGMNIMPKLCLEDTV

SEQ ID NO: 3340 - protein, 1114 aa, Cryptococcus neoformans
  MISC_FEATURE (828)..(828): Xaa = any amino acid
  MISC_FEATURE (845)..(845): Xaa = any amino acid
MAMGRCGPCVSCFIFGPVLADLGRSRSPAASPTYDTASSPTTPTVDMSFHPRASTDSTVSLPLALHTTESLPPGARRGYENRSTSFSGSSREIIRPLSNPAARLSNPQAQSQTRAPLPSLYPAILSMVSAAFKSYIPLADLTKDGITYKDSFSGQAAVTLIAELIKTSDRNLALLLGRSLDAQKFFHDVTYDHRLRDNPKEVYRFKDRLAAPFTDTNGNGESPVSEGRLTRNGSGASSTAMGLGGGLKALTAARPADSSSSMHTESTPVSMTPSRSSTMPFLDSDSPDGLDSEDTLPVGVFTLLTDCYSPTCSRDSLCYSINCPRRLEQMKRLNMKPEPGLNRKLSRESLVDVKETGTLWIHSVSQEILDSVDDKEKKRQEAINEVIYTERDFVRDLEYLRDSWVKPLRTQEVIDAKRRDDFVRQVFWNVHDVLSVNHVLAERLTKRQKKEPVVSRIGDIFLERVPLFEPFVTYGAHQLFGKYEFEKEKGANPVFQKFVDDTERKPESRKLELNGYLTKPTTRLGRYPLLLEAVLKYTPDDHPDKEDLPEVIKMIRGFLTKVNAESGKSENIFELAQIEQQLVFRPNERIDLRLRDKNRQLVHKGPLKRRGGNREEIADLLGFLFDHAFLLVKPKWVNKSEQYKVYRRPIPLELLVLVTPDEQYNSGKLSYGHGRSRLITRHPNSKTNHSSQNNSITAPPKPESKHGFSITILHLGKKGYSMQLWVDTHIGRKKWLENIDKQQGLLREKSTVFVSETITEGILSGVRKVNCSSPYDQGNRMIFGTDEGVYFANLRDEKLREPVKVINLIDVTQVDVIEEFQLLIVLHXRCVTTFPLDSLDPSDPXAALKRGKRISSHTSFIKSGVCLGKTLVAIVKSSTLSSTIKVMEPVDLSQNRKKTQAGFMKRLNGKDDALKLFKEFYIPTESSSVHFLKTKLCVGCTKGFEIVDLETLDMQGLLDPSDGSLDFVLKRDNVRPIAIYRIEEDFLLCYDAEFAFYVNKNGWRSRPKWAIVWEGIPTSFALQYPYVIAFEPTFIEVHHVETGHLVQIIPGNNIQCLRRHSSFTSQCPFTTESHDVRSAHSRDSPLCPSSQYARVSCLSQRILSWSSPTTSTNL

SEQ ID NO: 3341 - protein, 1124 aa, Cryptococcus neoformans
  MISC_FEATURE (84)..(84): Xaa = any amino acid
MVAAFDPLAPSQASSSTSPDNTTFHTLTRERQFRHPPVNASDVPALDELVAPHIKSFNALIEDEGNPGAKGLLQMGVEDSERRXVFDGKGSEGGLGTKLSYRIDRVALSKPLVPEKDKLAVERRARERLATYRSKLTVNIKWTVTDEDGNRKEFEEIKECGLLPVMVRSIRCNLQGLPATELIKHSEESTSFGGYFIVNGNEKIIRYLVVPRRHNPINLYRPSFAKRGASYTPYGCQIRCVRPDETACTNTIHYLSNGGATLRFAWRKVEYMIPLMLILKALVDASDKEIFEGLIQGEYDNTFLTDRVELLLRGQKSWGLHTGAQCLDYLGEKFRVVLNVPDDWSNVQVGGYLLRKVVLVHLPAPRDKFRMLLFMLRKLYSQVSGATCPDNPDSPQHHEVLLPGFLYGMIIKERFDDCLNAVKSQIQLDLRDGKARSFMDPKYFTSVLSKTNWDIGSKLSYFLATGNLVSPTGLDLQQTSGFTIVAEKLNFYRYLSHFRCIHRGAFFAELKTTTVRKLMPESWGFLCPVHTPDGSPCGLLNHLSHTCQIVTSSLDVSHIPALLSAQGMTQVFASSIDGRRMVCIQLDGKVIGYASPMKAKQLANRLRKLKTEADSKVPLDLEIGYVPVTKGGQYPGLYLFASRSRMMRPVTYLENGKLDHLGSFEQVYMDVAITKEEIEKGVSSHVELDPTSMLSVIANMTPFSDFNQSPRNMYQCQMGKQSMGTPSTAISKRTDNKMYRLQSGQTPVVRPDLHNQYGFDNFPNGTNAIVAVISYTGYDMEDAMILNKSAHERGFGYGTVYKADIFDLKGVPGASRSAKPTLHFGLGRDVKEDHDARNIISQDGLPIIGTRVKAGDPLCAYIDDTTGRTKFHKYKGDETAFIDEVRVLGSDAGDAELQKIHIKLRIPRSPVIGDKFSSRHGQKGVCSQKFPAIDMPFSESGMQPDVIINPHAFPSRMTIGMFVESMAGKAGALHGLAQDATPFKFSDKDRPVDYFGEQLRAAGYNYYGNEPMYSGITGEEFHADIYLGLVYYQRLRHMVNDKFQVRTTGPVDPLTRQPGRKRAGGIRFGEMERDALIAHGTSFLLQDRLMNCSDYSTAWVCRNCGSLVSRFRRSRWRSGYAGIL

SEQ ID NO: 3342 - protein, 1092 aa, Cryptococcus neoformans
  MISC_FEATURE (343)..(343): Xaa = any amino acid
MLPLQHKPLTILIGFLNYSYISLLVIRATPLLSPPTWLIGWTRVLDEFVVRRHSLDPSLAYNGLPSSLYFSSSSLLSNLASTTMTEGERPTFDIAVPAKDPEPKEDDKPKHTGDKGKARDENLQLKAELEMLVQRLREPDSGLYQPALESLRTLIRTSTSSMTSVPKPLKFLRPFYEEMGKIRDGWSEDLKEQRVSEILFILSLLASILSVLAMTYSDTGKRETLYYRVLSGSEEAPGLWGHEYVRHLAAELGEEYAATYAALGEDADIPQPDTKYTTDQLRALSIELVEFFLKHNAEADAVDILLEVENISAITKYVDDKTFERVCRYMVSCVPLLVNPDDXPFLETASVIYSKYDRYPEALALAVRLNSPELIRKYYEAPTNPVMKKQLSYFLAHAEPNDTIPTQPEDVLECLGNVKLSTHFRNFGKAVGVEEAKSVDDIYKTHLEPSSRNTAIPDSARQNLASTFVNAFVNAGFGNDKLMVNAPEGQSWIYKNKAEGMMSATASVGLSLLWDSESGIDHIDKYSYSAEEHIKAGAFLATGIVHSGIRSDPDIAFALLEEHVDSQSIPLKVSAINGIAIAYAGSERQDIADKLLPYVQDESTSMEVSSMAILALGFVFVGSSNGDIASEILQTLMEREENQLASEWTVFACLGLGLLYLSAQEKSEPTLATLKAIEHPIAQIAQTIVNICANAGTGNVLKIQEMLYICSEHATEKKDEKKEDTAAEGEGESPVASSEVPGAIPAAGPPVPPTAAGVPGTDIEGDVDMSDVAAEAGAPDGGAQSAVTGEEGEKEKEAEKTAEQLKHQAFATLGIALIAMGEDVGAEMALRQFQHLMTYGDPVIRKSVPLALGLISASNPQLSILDTLSKYSHDSDLDVAINAILAMGFVGAGTNNARLAQMLRGLAVYYAKEVDCLFMVRIAQGLVHMGKGTIGINPFYSDRQVMSKTAVAGLLSVLVSFTDARKFVLGKYHWMLYWIVPAMFPQFLITLNEELEEIPVTVRVGQAVNTVAQAGTRHGISGFQTHQSPVRIATTERAELGTNEFFPYQSVLEGLVILKKSVALFGPWNRLRIIMLILSLGTSSITRRTFIK

SEQ ID NO: 3343 - protein, 1117 aa, Cryptococcus neoformans
MLRHALRSVQRILTPSPIVYPRLQRTYAAMSAEETKVPSQESLPVEEINPAGPQPAIATEGAAEKSKKGAKKEAKRLEKLAKAATKTSAAQSQAPKKEKAEKKEKKAEVPAEAWVDTTPKGEKKDVSGNFPSGYDPIQVEAAHYDWWNAKGFFKPRYGADGKPLDKGTFCITFPPPNVTGNLHIGHALTVSLQDALIRWKRMQGQTVLYLPGYDHAGIATQAVVEQRLMKTEGHSRHHYGREKFLEKVWEWKDQYQGKITNQMTRLGGSFDWDKVAFTMDDNLSTAVREAFVQMHEKGLLYRANRLVNWCVYLNTSLSNLEVDQLHLTGRTLLNVKGYDAKERFEFGVITSFAYPIENSDERIIVATTRPETMLGDTAIAVHPDDPRYTHLHGKFAVHPFNGRRIPIVTDAITVDMEFGTGAVKITPAHDPNDFECGMRNNLEFISLMNDDGTYNENAGPYKGMKRFHVRNAIVKDLKEKGLYVEQKDNEMQIPICSRSGDVVEQIIKPQWWISCKPLAEDALKRTRAGELEIKPKTSAGDWVRWMENMQDWCISRQLWWGHRCPAWLLKFEGESPDTSDDKNWIVARTEEEAQEKAKARANGKNFILEQDDDVLDTWFSSGLWPFSTMGWPNKTPDMEHFYPNSILETGWDILFFWVARMVFFGNTLTNVMPFKEVYCHPMVRDAYGRKMSKSLGNVIDPLDVITGQKLEKLHNDLRMGNLPEKEILKAEEGQKKLYPKGIPQCGTDALRFTLCNYTSGGRDINMDIGRVEGYRKFCNKLWNATKFCLFRMDLVDLQGVRQTSAFVPNASHLPTGKEGLVEKWLFHKLNLASAAISDALENRDFSEASTVAYQYFLNDLCDVYIEATKPIFEANSDPAAKLSAQNTLYTCLEAGLKLLHPFMPYVTEDLWQRLPRREGDSCETIMLAPFPEKIPEQEFPAEVASFDLVVDCIKSARSVIGLYNLPTNGKTPEDKITVIIQARNAEQLELLKSVETVIVGLTKGCGKVEWIQEDSEIPRGCGTEVVTTDISVHIPVQGKVDAASEIDKLEKKSIVVEGQKAKLQKVIQQPNYEKTVKEDVRQQNDEKMEKIEVEIEALRMAIEVQGSFVDRLEIGGV

SEQ ID NO: 3344 - protein, 1187 aa, Cryptococcus neoformans
MELFQRETQRGLLSIYASSLLWAFNPRHQNLIPLPPPGYVHSALQFPTLTLTLTQAFTNTSFRAADRAARRTAEKNQQRLHVPLVNRNPEERKVTNEKGKGMDEGALPPPPIVVGIVGPPGVGKTTLLRSLVRRFTKHNLSQPQGPVTVVSGKTRRITFIECGNDLNSMIDLGKVVDLVLLMIDGSFGFEMASGFFRPAIFSLAIQETFEFLNILQSHGFPKVIGVLTHVDLIKKASTLKDTKKRLKHRFWTEIYQGAKLFSLSGVMNGRYPDAEINLLSRFISVMKFRPLVFRNQHPYLVADRIQDLTPREAIRENAKIDRTITLYGYVRGPNLPPRNAKIHIPGAGDLEVKEVERLADPCPLPTLESERRRKMGEKAKLIHAPMSDVGGVMYDKDAVYINVPGNFTKGGDTPQGEGEKMVMDLQDAEKTFADNIQASEIRLFGHSSAPLQVTEERKDRVRRKAEPRSGGPMLGKADEDEFDESEDDEFDDRSDTEEGGVFNGESDQDDDQDERDVAYAESESDHDDLAFATGFEQEGGRINFDDEDDDDFPSDEDDEDVPGWKHNLASRASSTLADRLRKKRNLMTLIYDTPLSPEEIVNGKTRPSSADASSSFAELQNEGLFRISHGENKGDDGDQVKEEVDRDQLKNKWADEEMLDSLRGLFISGPVAGEGVDEDGEAYEEEGEDFEDLEGGSDGRGDGEDDVPYVGVKPSQVSVEDARAAALAKKKEALKIKFDEQYDDSDDEASKMDFYDQQKAEMARQKQINEEEFGNLDLDARTQIEGYRSGMYVRLEIEAVPYELIENFDPRFPIIVGGLLAAEERFGFITVRIKRHRWFTKTLKTNDPLIFSLGWRRFQTLPLYHLDDHSIRNRYLKYTPEHMHCFATFYGPVSAPNTGFCAFNSLQGDAPGFRVSATGVVLDVDRSTKIVKKLKLTGAPYKIFKNTAFIKDMFNTGLEVAKFEGANIKTVSGIRGQVKKALSKPDGAFRATFEDKILLRDIVFLRAWYSIEPKKLYNPVCSLLLSNKESWQGMRLTGQIRREEGLKTPLDPNSAYRPIERTTRRFNPLKVPRKLAASLPFASKTPELSKQRKPTYMQSRAVVLGEDEKKAVTLLQQIQTLKKDKAERRKAKQDERKGAYRKKVGEKDEKREEKIREERRERFKKEGLKRKREEMSEGKGRGKKSRA

SEQ ID NO: 3345 - protein, 1261 aa, Cryptococcus neoformans
MDAGEYHSFTCTPDDYPLASQPLDDGFTYDPDYDYSQQTAPKGDEDEEKYDVDEDEPISQEDYWTVINSFFEEKGLVRQQLESFNEFIENTMQEIVDDHSRLTLDQFTQYTGVAGDETRRYEISFGQIYLARVNHTEMDGRTNMLFPQEARLRNLTYSAPLYVDIKKRTLTASGVDDPVEADWQPAVGDDGEVEGAEEEKTSIGKVPVMVRSNFCLLHGLPDDQCHEIGECPYDQGGYFIISGSEKVLIAQERMATNHVFVFLKAAPARFTYFAEINSQKEKGGRVANHTEVRMYARASGTTGGVIRVSLPYTKVDIPLVVVFRALGIVPDRDVLSHICFGAEDEALLEMLQPSIEESFAVQDRDTALDFIGRRGQHEKAPRAQRQRAAFDILHKEFLPHVSTAEGFESKKAYFLGYMVHRLCMAALGRKELDDRDHFGNKRLDLAGPLMAEMFNVVFGKLREDMYRYLKKATNFRQCVEQNKEFALNMAIRPNTITDGLKYALATGNWGKRDNTRAGVSQVLNRYTFASTLSHLRRTNTPIGRDSKAAKPRQLHNTHWGMVCPAETPEGSACGLVKNLALMSYISVGSYSAPVMEFLEEWGLEDLSEYQDAPTATKVFVNGVWMGIHRDAPTLHNNLLQMRRGGQLKYEVSIVRDIRERELRLYTDAGRVCRPLFIVDQPTQTLRLKRDHIDRIDQMADEGLLSGAWDKLLSEGIVEYVDAAEEETILIAMTPEDLVNARTAHSKHELVRDRAAHNLESFDPAARIKSTVWSQQYTHMEIHPSMILGVCASIVPFPDHNQSPRNTYQSAMGKQAMGVCLTNYQLRMDTMVNVLYYPQKPLATTRSMEYLKFSELPAGQNAIVAIMCYSGYNQEDSVIMNQSSIDRGLFRSLYFRSYTDTEKMKGMVKAETIEKPDRNETLRMKHGTGDRYAKLDVDGLVAPGTNVNGDDILIGKTAPLPEDSEELGQRTQLHTKRDISTPLKSTEQGVVDQVMLSTNGEGNMFVKIRVRSTRVPQIGDKFASRHGQKGTIGITYRQEDMPFTAEGLVPDIIINPHAIPSRMTIGHLVECLLSKVSTLTGAEGDATPFTELTVEAVSKVLRAKGYQSRGFEVLYHGHTGRKLQAQVYFGPTYYQRLKHMVDDKIHARARGPLQILTRQPVEGRSRDGGLRFGEMERDCMISHGIAGFLKERMYDSSDAFRIHVCDVCGLMAVANLKKQEFYCSVCRNSTQISQVYIPYAAKLLFQELQAMNIACRMYGETD

SEQ ID NO: 3346 - protein, 1189 aa, Cryptococcus neoformans
MSDINYLRGTNKLNGAAGAKRKVINSTSVKNVIKREPSPVLAIAPEAAPEIEEIQSVKPRTNGKPKVKANAKHWSAIQESLAASSSNQTSELDTVSAPVGSTKPENVMEKDGSLRFFWLDHLEQDGIVHLVGKVLDKQTGKYVSACVSVTGIERCLYVKPRAKRFARGFETDLDVSEEDVLDEFENFRSQVGIDQYRCKFVKRKYAFEDKDVEKGESDWLEVVYGFDRESCVRVYRLVLNKIEPAIPMDSNGATFSHIFGTNTTPFELFVVNQKIMGPSWLEIKDIAPVEKASSWCKLEFYVTDPSEVNPFSETDPSAPKDTPPFTIMSISLRTIVNHRENKTEILSVSMRTWDNYNIEDPTPPDQLRSQLNTIVRPIERFPSGLESKARSEKSQFQTVKTERALLNSMLGMIYRHDPDVIVGHNFLGGGFEALLYRMKELKADHWSRIGRFRRKGMNVSKMGSNVKLMAGRLVADLSSDAAKGMISSTTWSLTEMTNTHLKVQREDIDPEDTAGYFDHTATSPDRLIKFIRLCEVDAFFQMAIAARVQILPLTKQLTNLAGNSWNLTLNGGRAVRNEFILLHEFHRLEYVCPDKAPYKAKTRPTGDDDEVTEDIIAMKGQRGKAKYAGGLVFEPKRGLWDKYIIIMDFNSLYPSIIQEYNIDFTTVERDDDENKIPDVPSSDVPQGVLPRIIATLVNRRRQVKALMKDKSATPAKLLQYDIKQQALKLTANSMYGCLGFAGSRFSSRPLAALTTFKGREILTHTRELAESLQLDVVYGDTDSVFVNSNVTTYPEALKIANEFKKLVNERYKLLEIDLDAVFERILLLNKKKYAAVKIDEAGERSTEVKGLDMKRREFSKVSKDASAAILKEILSGEATEVVVEKIHELLTKLGEAVRNNEIPIDDYIIFKRLGKNPEDYPDKKSQPHVQVALRMKQKGAAVRAHDVIPYIICLDEHGKGGKTASADRAFHPDDLRRQGSELRIDHEYYLDQQILHPILRLCETIEGTERARLAECLGLDPLRYTSTGTAEAQEKEFFTFDSQISDNDRFRDADPLNLVCPSCSEETVFVGLQTDASEVSNIRANGICCNSCQLVIHPASLQLQLENQIRSHISKYYLGWMTCDGEGCGLRTRAMSVYGKRCLGFIKENCWGTMRLEYTDAKLYNQLLYYRSLFDVEKPKCCARLATFR

SEQ ID NO: 3347 - protein, 1178 aa, Cryptococcus neoformans
MWIERSPTDRRGCWREKMRKGAWWNKEMVPLLLLRVSSSALSTEHLPPSHTISSPLLPSFLPPSHSHHGGTSPRHPPPFLPSFLRRKLTQSQPQAILDFSNDLDVGLIDQVVQAFYTGSGETQQTAQRVLTQFQENPDSWQRVPAILETSQNLNTKYIALQVLEKLVQVRWKALPADQQTGIRNFIVQATVEISSDESRMRREKGYLNKLNLVLVQILKQAWPKDWPQFIPEICESSRTNLSLCENNMIILRLLSEEVFDFSAEQMTQAKTKALKQTMCAEFGEIFNLCNEVLEKANKPSLIRATLETLLRFLNWIPLGYIFETQIIDILVSRFLEVPDFRNVTLKCLSEIGALNVGPEYNSKFVTLFQVVMTSINRMVPPHTDMAGAYASSDDEDQQLIKNLALFLTNFLHPHLRLIETPENTELLINAHLYLVKISTVDDREVFKICLEYWLKLVTELYEEIQSLPLNDINPLMNLNLGGIGGGLNGAQGMGLNGMPLRKNVYSDILSNLRLVMIEKMVKPEEVLIVENEEGEIVREFMKESDTIVLYKSMREVLVYLTHLDVVDTETIMTDKLAKQIDGSEWSWNNLNTLCWAIGSISGAMNEETEKRFLVTVIKDLLGLTEMKRGKDNKAVCASDIMYIVGQYPRFLKAHWKFLKTVVNKLFEFMHETHEGVQDMACDTFIKIAQKCRRHFVMQQAGEQEPFIDEILRTLHRITVDLSPQQVHTFYEAVGYMIASQPNKPTQERLIEKLMELPNNAWDNLMQQAASSVDVLGNPENVKILANILKTNVSACSSIGPFFLPQLGRIWLDMLGLYRTVSGIISDDIAAMGEVATKTPKVRALRTIKKEILKLVETYVKKAEDIEGVYNNLIPGLFDAILGDYNRNVPAARDAEVLNVTATIVSKLGPILTPQIAPILDAVFEPTLGMINQDFAEYPEHRVGFFKLLRAINLTCFQALLEIPPGQFKLIVDSIVWAFKHTMRDIADTGLNIAYEIVNNFAASTPEIANQFYQQYLLSLVGDVFFVLTDADHKSGLKMQGMLLAQLIALVETGAVQAPLFDPAQVTDPGMNNVIFLKGYISDLLSNAFGHVQPAQIASFVNLMFETAADHNKFKLTIRDFLISLKEFSGDNAELYIDEREAEAERREREEREAASRVPGMLKPAQIEDDRVIGEGKGG

SEQ ID NO: 3348 - protein, 1203 aa, Cryptococcus neoformans
  MISC_FEATURE (878)..(878): Xaa = any amino acid
MRMTGFKSYRDQVAVDPFSPGHNVVVGRNGSGKSNFFSAIRFVLSDQYTKLSREERQRLLHEGTSTSTTLSAYVEIVFDNSDGRFPTGRQELVLRRTIGLKKDEYSLDRKSASKSEVDQLLESAGFSKANPYYIVPQGRITHLTNMNDRERLRLLKDVAGTEVYEQKRAESTRIMEETDGKRDKILELLTTIEDRLRELEEEKEELKEYQEKDRERRCLEYALHQRELEDVTNALDEIEAERRQDIHNSNEKRKEFNDREDEIQEALTAAKHSLSTTQASLRQYETERADLVRNKTELECVIADFETAGQVGEHRRAELAEELEVMQQKVDEATARLEDLVQEAEQRIGEEKAAREALEPTQSKLSVLFAKQGRAQQFATQAARDKYLKDEIKALKEHEKNQGKRVEILQKEVAGAKEQLAQLSAKSEQQVQGENDRRENLKKMNEEIAQLQRNIAGMHEQKKELWREEGKLAQTEVNAKSEMEAAERSLMGMMNKDTSNGLRAVRQIAKRLNLDGVFGPLYDLFEVSDKYKTAVEVTSGNSLFHVVVDNDETASKLLDVMNREKSGRVTFMPLNRLKSHSVNYPKANDAIPMIQKLQFDREYVMAFEQVFGRTIICEDLQTAAHYTRSHGLNAVTIEGDRVDRKGALTGGYHDVRRSRLDAVKAAKKWRTAYETDHARHAEVKAALQNIEQEVTRTMGQVQALEAKKRHMSDGGEGSFKLLTLPARDLDQARDRVARLEFSLEEAEGASRDAKAKRASYEEELRTPMRQNLTDEELRELETLTQNAEAQKKLLFEATQNRAKAVGERNRLEIELSENLRRKRQELRGKLDRLEGEAGNGELQSGEVELRRSELRNLVRDIEQLEEKVSESEGRVGEXNSEISKISENLERVQTQQMENTRAIMRVQKNAERYLTKRQTLINRKEECNNAIRDLGVLPEEAFSKYIDQRSDKIIKRLHKVNDGLKKFAHVNKKAFEQYSNFTKQRDELMDRRDELDQSAIKIEELIETLDQRKDEAIERTFKQVSKYFEEVFETLVPLGKGELIMQKKTDGFIVSIEEESEESLEQGREKSDIDSYTGVSIRVSFNSKHDEGQRIQQLSGGQKSLVALALVFAIQKCDPAPFYLFDEIDANLDAQYRTAVATMIHTLSTSAQFITTTFKSEMLAQADKFYGVFFDKQKVSTIKVIEKEEASDFVETAAQVGQL

SEQ ID NO: 3349 - protein, 1251 aa, Cryptococcus neoformans
  MISC_FEATURE (268)..(268): Xaa = any amino acid
MWHSARSPSAHHVTSDNRDPLPTTSHNSILSKLSPKSKSPRVKGIAFHPKQPLLAASLHNGTIQLWNYQMGTLVDRYDEHDGPVRGICFHPTQPIFCSGGDDYKIKVWNYKQRKCLFTLTGHLDYVRTVFFHREYPWIISASDDQTIRIWNWQSRTCIAILTGHNHYIMCAQFHPWDDLVISASMDLTVRVWDISGLRKKNQASQAPMSAEEQIARASQGQADLFGNTDAVVKYVLEGHDRGVNWASFHPTLPLIVSCGDDRQVKLWXMSETKAWEVDSCRGHFNNVSMTMFHPKHELILSASEDKTIRAWDMTKRTAVQTFRREHDRFWVLTAHPELNLFAAGHDNGLIVFKLERERPPFSLSGNQLFYIKDKVVRMADISSGNSQGICSVRKFGSQYIPPRTLSYNPAERAVIVTSPSDNGIYELITLPKSTAPTAQDGRDVPSDGKKGTGFCALFVARNRFAVLDKGAQNIEIKDLSNSITKTIKCPVQTSEIFYGGTASILLATPSSVVLFDIQQQKIVAEINTPPVKYVVWSTDGNMVALLSKHTITIANKSLSQSALIHETIRIKSAAWDDSGVLIYTTLNHIKYALSQGDNGIIKTLEQPVYLTRVKGSVVHCLDRSAKPQAINIDPAEYRFKLALNRKNYDEVLHIIRNSNLVGQSIIGYLQKKGYPEIALHFVQDEQTRFDLAIECGNLAVALEMARAVDRHDVWERLGAAALQQGNHQIVETAYQKTRNFDKLSFLYLITGNTQKLNMMQVIAGKRGDNMSRFQNSLYLGDVRSRVVVLRETGQYPLAYYTAKTNGLDDLALEILDEAGLTEDDLPPPPQNSGHSSLAPPPIIFSQSDSNWPLKDLGESFFDRALANGGVDALIGGEESGEQLDAWAADVPVEEDEGEEQAADEDEGWDLDANVEVPDVEEEEFDGEDVLAEADLSQGVEPGASEDEIWQNNSALAIDHAAAGAFESAMLLLNKQVGVVNFEPLKPLFLQAYQHSHVYVPANASLPPLRLNVRRNPETAELRDALPAVPLNYSELKATEVADANKYFARGKFVEALATFKNVLSKLLLVVVESEEDAEEIKELVTSCREYIIGLTMEVERRRIAVQDPENVVRNLELAAYFTHCELATQHIQLALRSAMKVFSDAGNTATAAVFARRLIETQPGQAVITQVGLALVLKCQRNPRDVHEIAYDQNASFNICAATHTPIYEGSPYEESAYSGAKYLPEYKGTVCVVDGLSQVGLAGSGLRNMV

SEQ ID NO: 3350 - protein, 1185 aa, Cryptococcus neoformans
MRVEELILDEDSWPVGFKSYPVRTTISGFDESFNAITGLNGSGKSNILDAICFVLGITNMQSVRANNLMDLIYKRGQAGVTKASVTIVFNNEDRSKSPVGFENTPQITVTRQIAVGNVSKYLLNGHKSTLQALQNLFQSVQLNINNPNFLIMQGKITKVLNMKPAEILGMVEEAAGTRMFEERKDKAMKTMTKKDKKVEEIESLLREEIDPKLEKLRAEKRSYLEYQKATSELERLTRLVKAYEWVAAVEKAEKATETVKKKRKDIETAKGDIMRGGKECHGMEKELEEIRKKKEKEQAKGGKIQGLTEAVNNLERELVKIKTQIEITESTLKDDAKRLSKTLEDRRSETSKESSAFAELKDAYDAGQAELSKLEELLQSLLTGLSSNQNDEENAGGYLGQLAEAKARLAAAGTEAEQAKVKIGLAEKELKEKEPRAKKAEKDGEGLVKELAAKRAQMEKLRKQVESAGWDEQQEREMLESQAEHQSKMTELMDKRDMLKSRLASIDFTYSDPEANFDRSKVKGLVANLVDLDEENFSNSTALEICAGGKLYNVVVHDEKVGSKLLKNGNLRKRVTIIPLNKIDATKIAAEKLAAAHRVAPGKVNLALDLVGYPEDVSAAMAYVFGRTFICADKRTAEAITFNKSIAVKSVTVEGDVYDPSGTLSGGSAPSSGGVLVKVQELKQIEREIAKHRSAVEEIRSKLQSAKKVIDQWKKDKKNLELSEHEVRLLEEQIKGSNATKIIAEVEAARTSLADLKNIVNQAKEKQKQASADCKRLEKEMADFKNNKDSKLNEIKANITSKKNELGKKTLQVKTRQKAIQTAELELRKLTSSFFVLLSEHLNLISLQSNWKVISKVLRLRSRKPLLLKRRQRLNTAAETKLRSEEAVLVAFDNELADLERDLKAKKQDISDAELSLKKLEHDLGLVEKEKASLVDHKVNLENRFQWILDEHQFFGKIGTPYDFRSVDLQQARDQCRELESQANGMGKKINPKVMNMIDSVEKKEQALKKMMATVLKDKSMIQDTIEELDRYKRDALTKTWEKVNGDFGLIFAELLPGNFAKLQPPEGQDLTQGLEVKVRLGSVWKASLTELSGGQRSLIALSLIMSLLQFKPAPMYILDEIDAALDLQHTQHIGQLFRNRFKGSQFIVVSLKEGLFTNANVLFRARFRDGTSIVEVLLSLSASQ

SEQ ID NO: 3351 - protein, 1212 aa, Cryptococcus neoformans
MAEFTLQEHLLALSDPPLYQISAELDIPSLRTSSIDSSLSSAIEEIAGDPESIVNSSPSTFDVFRSILKHADQPNVDSGILTKLLDVIVSGLSYHSSTVMAIVNGQGFGAEADMDAPMVHKQPLEMWAFLLQWFVNAAERGAGKTNDEPRQAMTGRGKKKTTKTAGGAGISTSFVFSDHLPLVLGTMHKTLRIPTSRLWRTSSEREAFISCFVKPAYQLAETEAYLKISEIRLGIFKVICLAVKFHQHAFGAQTSIMQNLTYFEHLSEPMAELLAILEKEFDFSQLGEEVLRDVAGKSFAHNDAKGPRSFSRFLVRLTELSPRMVQKQMPLLLAHLDSDAHPMRMAIVEIIGILIKDISSSDEGDEEQKTKQIQRFFELLMERFLDLNSWVRCKVLTTLIKLCDLPAKFPKQRHQITELTIRTLEDKTSSARRYAIQLLCKLLETHPFGALHGGTLNLQEWQERYEKVAEELKKVDAQELEMAKREVGVEDDDEEGEDDEEQKEDEEGTKFNKEKEDGDKEEDDEAQNESTPKPKKKKPRQSQLDLSAIQSEQASIDPNLITKLRLTKKYYGDALRFINQLESAIPTLCQLLVSTTKTEVLESMRFFRVAYEYDIASAEQGIKTMLHLIWTKDNNATAGEEGEGKGIRGSVIECYRSLYFDVVPDLSPKQQVNRITKNMIERTYGATLAELTSLEELMRTMMGENMVHTDVVNKLWQVYIGTEQEIPKAQRQGAIIILGMLALAKKEVVTEKVDKLLKIGLGPLGMQDLVLAKYTCIALQRLSGSAKKVKDKTMRLPMDNPIFTKLQDIIEFSPKSPQWFSMAEQAVNTIYLLGEQPDRLCTKIIKDLTAKVFEAPEKEMEVALLKAQASSFRIAQMVFIVGHVALKHIVYLELVEREFKRRKDEKAKGKSNLIVNAEKAAAKAAEKDQNDLDAVAGNAEDDIGDLISTMKEKELLYGDKSLLAVYGDLIAHICASPKKYKYPSLREAATLSLSKLMCVSSQFCEQHLPLLFKILETSKDPVVRSNIVIALGDIAVCFGNLIDDNSERLYQGLADTDLVVKKNTLMVLTHLILNGMIKVKGQLGEMAKCLEDPDQRISDLAKLFFTELSTKDNALYNNLQDVISHLSIGAHAVDEGTFERTMRFIFTFIEKEKQAESIVEKLCQRFRQATEERQWRDISYCLSLLPFKSERSVKKLIEGCVLFILSMKDVLD

SEQ ID NO: 3352 - protein, 1266 aa, Cryptococcus neoformans
MISQAPAAKKAAPKKINKAPLASKKHPNESLSDAGSDTVCSPPKKKTKADDDDGDFGTESSAKAPTSNKNASEVYQKLSQREHVLKRPDTYIGSVEAITQPMWILNPETKTMVHRPITFVPGFLKIFDEILVNASDNKINDPTMDSIKVVIDREKNAISVYNNGRGIPVEMHTKEGVMIPELIFGHLLAGSNFDDDQKKLTGGRNGYGAKLANIYSHEFIVETADKVNSKKYKQIFSNNMSKKGTPKITDNKKGEEWTKITFKPDLERFGMNGIDDDTNALLMKRVYDMAGTVKDVKVFLNDERIKVKNFKQYVEMYLNASTTATSEAAGGAAVTKPPIIYEVANKRWEVAFALSDGEFKQVSFTNSIATTKGGTHVDMIATQLANKLMDQIKKKNKAAPVKPFQIKNHMWIFVNALIENPAFDSQTKENLTLKSSAFGSKCELSEEFIKKVAKTGIIDNVLNWARFKQDQILKKTDGTKRSRISGIVKLEDANNAGGRNSKNCTLILTEGDSAKALAVSGLAVVGRDEYGVFPLRGKLLNVREAGHDQIVKNVEIQHIKQILGLKHNQDYATADSLRYGHLMIMTDQDHDGSHIKGLIINFLDHFYPSLLRIPNFLVEFITPIVKVWKGKKEISFYTMPQYEEWKAQNNNGRGWESKYYKGLGTSTSADAKKYFSDLDKHRLAFETMQPEDRQLIDMAFNKKKADDRKEWLRQFKPGTYLDHDVQSLPISDFVNKELILFSMADNIRSIPSVADGLKPGQRKVLFGCFKRNLTKEIKVAQLAGYVSEKTAYHHGEASLTSTIVGLAQNFVGSNNINLLDPNGQFGTRLAGGKDAASARYIFTNLPRMTRAIFHPADDGLLNYLVEDGMSIEPDYFMPTVPMVLINGADGIGTGWSTAIPNYNPVDIVENLRRMMRGEEPEKMTPWFRGFKGFIERIDQDKYKVSGIIEKINDTTLEITELPIRRWTQDFKEMLEEMTTGTDKVPQTIKDYEEHHTDTTVHFRVHMTEKNLADAEKEGFDKRFKLTTSLGTGNMVCFDLNGKIKKYASPEEILEEFFHKRLEFYGHRKQHLADELNRQFERLSNQARFVHMIITKELVVSGKRRPDIVAELRSLKFKPFPKKERAKEEGENEAAEEEEDGDEGQASDYDYLLGMAIWSLTSEKVRKLLAERDAKEQELIELLKLSPNNIWDRDLDNFLAEWQVSCRYLLLLTSWLIIQKYSLPLKPTLLMPKVQNPKRKPLLSKRLKSRKSVLCNQLSLPHMHYVP

SEQ ID NO: 3353 - protein, 1242 aa, Cryptococcus neoformans
MPLQRLELYNFKSYREKQVISFGDVPFVSIIGPNGAGKSNLMDAISFVLGVKSAQLRSTQLKDLIYRGRRAAAQEAESETQTQSESGDNSGDARSAWVMAVYMDDAGKEWTFRRSVSMSGSSSYFLDGRSVAWKDYNAQLAKFNILVKAKNFLVFQGDVEGVASQDSKALARLIDRISGSLDLAPSYEAAKAAQEKATEASSTNYAKKRSMLTEAKHFREQQEEIKQWERLNDSKDALTQRLILWKLYHLANKISQSTQKVEEANDRLAEFRAASSEADSNLSDVKREQAKAQLNVKKREANLKKAEKVFEDKKPELVAIDTQIAHSEKRASGAAAQEEKVKKDEKRQADTVKELEKGLELITKNMEEAGGECCGSLTADEHIIERQRQRSQASGITLSGADLNEYRQLCVYPWLTYSLTMAYNQRRRASANLHAVQERQQLETLRREEKNLRDALASVEDQIQQARRRREKLTGEVGNLAEREETVSHSLMRETEINERLQDTYHKLLQAGADRRENEREAKLKETLASLKRIFPGVHGRVVDLCRPVATKYDTAVMTVLGRNIDAVVVEHEKVAIDCIEYMRNQRAGQATFIPLDTIQVKPVPERLRNFARGARLAIDCIEYDPAVERAMQHACSSSLICDTMDIAKYVCYERGQEVKAVTLDGTVIHKSGLITGGQGSGGGRKFDDKEVEGLNKLKETYLGQLQELYRSKPQDKGDEALLESLSRLDAESNIAKDDLHAIQVRLHGLREELTHVISTIERLTPDVEARSRSVASSEERLAALVETIEQADDEVFDTFCQRIGVSNIREYEDVQLRIAKEANDAMESFAAQQARVKHQIDFESSQLRNTRERIAHLRNLASKAESNVTELRSRREEVQAELESLQAEIDRQRGKLNDANDVRDEVIRRVDEMRERSRKAQKTLDRVIKEIATWNDEILKYASDRHAIYRRCRLEEIDLPLVKGRLDKVPIEEEATQKPVQVDDYGLEPDFDVLEEEDRENEDEEVGREFEAQISKMRNDLERLAPNMKAVERLDEVERELDDAEREAEETRKESKRAKDDFQAIKKKRCDLFNKAYNHMSEVIDKIYKDLTKSQNQVGGTAWFTLEEAEEPYLSGVNYSTMPPGKRFAEMEQLSGGEKTMAALALLFAIHSFHPAPFFVLDEVDAALDATNVQKLARYVRSQADRNVQFLIISLKSTLYEKADGLVGVYREQEENSSMTLTLDLRKKLDCNSSGVTCSKV

SEQ ID NO: 3354 - protein, 1402 aa, Cryptococcus neoformans
MYPGAKLYLQRITELQSAGSSKESSTELAKLKMILDMYARAMQLEQERAAAANKPDGPADTSTAASTNGQAGPSNPAHVSMNPTQIAQLRTQAAAYQHLSRGQPVPSYLLAAAQGTPPPGIGGQPPVPTGLNGIQGKVADKTVEAVVEDSIEAKKAREKEEQQDKTSEGPDGAAPPDGPSQPPYAMEFDETSIIYPYNAYTDPSFYSKRKFDEEVINPLHKRQRLITPSIMPRGLDPYLLMEERNRFIETRMAWRMKELENMDSTAGLGQPGAGDVPNVIESEKPGTPMGVRARIELMGLRLLGKQRLLREDVVRAMHGASQIPADRSQFRRFRTHTLRDARATETAERRQRTEREQRGKQRHLAYINSICEHGQALIGAGVSTARGQGADKMKRLGRAMMKLHAETEREEQKRIERIAKERLKALRNDDEEAYLALLGEAKDSRISHLMDQTDQYLETLAAAVVEQQNDDVHRDAIMAVPFEQEEGVASEEMFGAKRQDGEESGAERRAGKVDYYAVAHKIQEKVTKQASILSGGTLKDYQVKGLQWMISLYNNRLNGILADEMGLGKTIQTISLITYLIEKKKQPGPFLVIVPLSTLTNWTMEFERWAPAVRTLILKGSPAVRREAYPRLRAIDFQVCLTTYEYIIKERPLLSRIKWIHMIIDEGHRMKNVKSKLSQTLNEYYSSRYRLILTGTPLQNNLPELWALLNFVLPKIFNSVKSFDEWFNAPFANTGGEKMEMNEEEALLVVKRLHKVLRPFLLRRLKKDVESELPDKVEKVIYTKMSALQWKLYESVQKYKTLPTDMSVAKPQKRQNLQNALMQLRKICNHPYVFREVDEDFTVGNTTDEQIIRVAGKFELLDRILPKLFKTGHKVLIFFQMTEIMTIVSDFFDFRGWKYCRLDGSTKAEDRQTLLSTFNDPNSPYQVFILSTRAGGLGLNLQSADTVIIYDTDWNPHADLQAQDRAHRIGQKKEVRVLRLISSGTVEELVLARAQRKLEIDGKVIQAGKFDEVTTGAEYEALLQKAFETSAEEDNEETNELDDDELNELLARGDNELGIFTAMDNERKERKIAEWRASGSKGELPPPLMQESELPPFYRRDIGQELAEELANEEEQGRGRRNKGEVRYTDGLTDDQFIAALENSDDDVEDAADRKRKRAEKKAERKRMNEVLVQAEAEGRPLDVVATKEVVEPIKKKRGRPSSSVTPSVTGDEVPTKKRKMEKVQGPEVQLMTKLFIEVNKLKSDLGEDLNQFFLVPVNRKDYPDYYRIIAQPIAMSQIKAKIGKPSYNLASFRNDLHLLWNNARTYNQEGSWVFNAAEDMQEAFDKMWDDEVPQFLASQAAGAENSVGETSAGASGSSTPMFKPVGDKTTAPKIRISMGKKKIEAAMDGDESMDGGEDDDY

SEQ ID NO: 3355 - protein, 1367 aa, Cryptococcus neoformans
  MISC_FEATURE (357)..(357): Xaa = any amino acid
MDMDTRYGCGKATNKKTKKADNCHVRSGGCKSGHVRQQKAQRFRAPSSSWSSSANRRAGQGSGVISAPARWLEAALVRFSFSIHPSISFFHRHLSFLKPLLPTQAQVANRKMKLKDISRTATFAWDNTSSSAPLLATGAVAGALDESFSNESQLEIWQPDFGDVSNVKLGGEGKPALGSITVSSRFNQLAWSAPSTTHMKGVLAAGMETGEVNVFDPSKIVTGASADEARIFKSEKHTGPVRGLDFNSIQKNLMLTGSVNAEIYIYDLNSPNNAPIPPGPTSTKLNEITALQWNPTVSRVFAASSSSGFTSVWDLKAGKEIVSLQYGGGAAKGMETVGGATRLITASEDDESPIIMXWDLRNTRAPEKILSGHHKGVLSVSWCKQDADLLLSCGKDNRTLCWNPQTGEIIGELPTSNDWSFQTSWCPRNPDLLATASFDGHIGIHSLQTTSIPSQSTEKLSEAATADDVFGALGNEQPQDETVNVLSLKQAPKWLRRPVSATFGFGGLLATTSNLPGASGKHQSGVEEVAKKVQDAIKKFPNAIKAAGDATPVIAPLEEESVKTPTAEKPEAIEDVSTTSDAGVESHDDKSENIVSHKSEAAESSVAATVGSRASSVRDEIVNKENTFQIYPEGESDIDKLVTQALVMGDFKSAVDVCLAFDRFADALLLAVRGGPDLLQSTQNAYFAQQTTSRPFLRVFQSIVTEDLLDIVQNADLSEWKVAFVVLCTFAKDTDFGNLAEQIGQRLQYRWRVLSASDSSEAKASAKIARQDATLCYLAAKKLEKVVSIWVDEMAEEEEAVSATRYTSHAQALQSFIEKVSVFKAATGYVDEDLLTPTESAAAAEAGARTYKLAGLYDRYYEYADLLATQGLVDIAAKYVKMTPVDYKGSEQVGELDKARQRILSAAGGNVGTKMAQTTGKVQSTAGSSIARGYAPAQQASAYASSQPAYALQQPTTYAASTAPAYQAPPAASGPYQPASTSTAYAPPQPTPSYGDSNPYAPATVYQPSSGYPPNGYRPSDPQPQGYGAPQPSFGQTQAMPPPPRVGSQQRGISGWNDAPTFAPKRPQSAAKDVKKASAILSPFPNSADPLAAAGAGLNTAGAAPPPGRSPQPGVIPPPPKNARPPSIAAKVQPPPTVQQQQQFHQHAQHQQQQRQQQLTSPPAAAGPPPSAFSRPPPPGARAGPPPGAFAGPPPQRALSPLGPGRLSSPPGSQIRPPSAVQRPPSQPGQVQSLDGGITGMGGPPPPGSRMAGPPPGRSATPQQQQRQQIIPPATSPSQTKIQSPSSEQVKPRHPAGDRSHIPEASKPIYEILSGELTKVKQSNIPPHVKRIVDDTERRLNILFDGLNNETVPKQAVDMMNEISKGQ

SEQ ID NO: 3356 - protein, 1462 aa, Cryptococcus neoformans
MTVTFPYSSAPVKQVKEIQFGIMSPEEIKAFSVAKIESTEVLDENGKQKVGGLMDPKMGTIDRNFKCQTCLEGMSECPGHFGHIELARPVFHQGFIVKVKKILECVCYSCGKLKVDMVYPMVANAVRRIKAQHRLKAIWALAKDKKHCEPDELDEKDNGDATFEDEYLQEQKAAMKGHGGCGHEQPVWRKKGLKLMGVWKPTDKGEGKERNISPGEVYNILKKITPEDLHIMGLNADYARPDWMILTVLPVPPAAVRPSIAVDGGAMRSEDDLTYKLSQIIKFNGVVRRMEAEGVPPSVVNEQFDLLQYHVCTYMDNDIAGLPRDQQKGGRAIKAIRARLKGKEGRMRGTLMGQRVDFSARTVITGDPNLQLDQVGVPKSIAMTLAYPERVTPYNIVYLQTLVNNGPATYPGARYYVKDTGERVDLKYRKSGEPISLQFGWIVERHLKDGDYVLFNRQPSLHKMSMMSHRVKLMNYSTFRLNLSVTSPYNADFDGDEMNLHVPQSEETRAELSQIAWVPRQIVSPQANKPVMGIVQDTLCGIRKFTLRDNFLDWLQVQHILLWLPEWDGTIPPPAIFKPKPMWTGKQLLSMTIPKGINITYKNNEKPSPIDVTDENVLIENGELVHGTIVKNMAGSANNGLVHVIFRELGHIAARDFFSAVQRVVNYWLLHFGFSVGIGDTIVDKATMAGITNRMVEAKEAVQKLIQEAEANRMKPKPGMTIRETLEASIAAELNKARDWTGKTTQDNLKADNNVKQMVVSGAKGSFINISQMSGVVGQQFVEGKRISFGFRHRSLPHFSRDDYGPESRGFVENSYLRGLTPQEFWFHAMGGREGLIDTAVKTAETGYIQRRLVKAMEDLKVAYDGTVRNSVNEVVQFLYGEDGMDGAAMEKQSLDIIRLSDQAFERRYKIDVLGGSGFSKGILQAGIDQSSISLQKLLDEEFAQISEDRRILRSEIYPDGTPGHPLPVNIQRVIQNSQQIFHIDPRVPSDLDPVYLLEQRDALADRLLVVRGDDKLSRAAQKNATLVFNMLLRSHLATRRVLEEYHLNREAFDWVIGEVEQIFNKAVVNAAEMVGTLAAQSIGEPATQMTLNTFHYAGVASKSVTGGVPRLKEIINVAVNIRTPALNVYLEPEYSKTEEDAHQIMRKLTYTRLRDITATVEIFYDPKLDSTDIEEDKDFVDAFFAIPDEDIRLELHSPWLLRLELDRAKVLEGGYEMSQIVDAIAETVGKDVFVIHSEDNAPKLVIRIRVVAEKEDEELLGDEDMFLKRIEGTLLDQVELGGITGITRVFISEGKQVVVSQNGEYDQEKEWFLETDGINLKEVMAVDGVNAFRTYSNNCYEVYETLGIEAARNALYKELNGVIEMGGSYVNYRHLALLCDLMCSKGALMSITRHGINRTDAGALSRAAFEETVEILLEAAAVGDVDDCKGVAENVLLGQMAPMGTGAFDVSLDMNMLKCHC

SEQ ID NO: 3357 - protein, 1465 aa, Cryptococcus neoformans
  MISC_FEATURE (1357)..(1357): Xaa = any amino acid
MPPRRTTRAVSSSTAAPAPSTRTRRGRKAAASSAPSVDSDEDDGITVTQGSSDQEEAEEAQEETKPKARRGVSKAKPKAVPAPKRRNVGTSVALEKEDSEDELGLSPPRPKVKKAIPAPNSRVKEQMVTSEDEDEAEEELQNALRARRASTATLAASEPPTPTPQAHEEDDRSATPRASSGAPEIRIERADSDDNDEVSTVGQKTPTKPPRSSSEKPVTPLRSPHTSAPAPAPRPAQSGPKSRLTIHKLVLVNFKSYAGRQEIGPFHKSFSAIVGPNGSGKSNTIDALLFVFGYRASKMRQGKLSELIHNSAGKENLESCSVEVWFREIIDLPGANDFLLVPNSQIIVNRTAFRNNSSKYTINDRTSSFTEVTTLLKGKGIDLDHNRFLILQGEVESIAQMKAKAQNEHEDGLLEYLEDIIGTTKYKEPIEQASLEFEALNEERVEKMNRLRVVEREKAALEGQKQEAEEYLRASNELTRMTSKQWQLWMYHLQNQTEITSKAIERLESQLAAEQERNAEHIATVDDLQKEYEERLASIAEVKAMLDKLHKEAKKYEKEQVGYAEKKKHLETKMKKIKKSITEDGHAKSEALAAIESYTEQLESNRKKVADLEEKLESEQAELEEVVDSLKDKTAVFTTQIEIKQRELEPWTAKISEKQSAMDVAKSERDLLAEKATGILKSMQEAEEHLQSLRDGDGEKQEEYARLKKEASKIKKLTAEGEAKVDSMTTKWDQLRGKVSASRLKTDEARASLAADKSENAVLSSLNKLRDQGRIKGFHGRLGDLGVIDDKYDVAVTTACPTLNHLIVDSVKQGEACIDFLRKGNIGRANIMVLEKLPQKAPNPIQTPENVPRLFDLIKPKDPWFAPAFYKGLGNTLVANDLEQAQRIGFGSSQRWRVVTLGGQLIDPSGTMSGGGNRVARGGMSSKFKADKVAPEVVVKLEKESADAEAELQKFQEEKKAIESEVVSLKRRLPEIEMEMEKIELDVSTATKRIVEAEKRLSELKSQSKPDAGDEKRIKTLDAEIASLTKETDKLREKSSSINDDIKSLQNKILEVGGVRLRAIQSKVSITKGLLDLANESITKAEVGQAKAERDVEKLEKSIANNNTTLEEVVEELELVESNLEGCTADLNKVIDSIQQVNDSSDDINEDFEQSKQLLEEKQAGINAFRALEVGFFFTTQKRAKGIVQMDYKQQIEDNARKLKESQEKYQFYERKLAGLELKKQSSMELEQYSPDELRATNETALKAYIAELEDDVKNSRPNLNILAEYRKREAEFLDRARDLETVTKARDAAKARYDELRKVRLDEFMAGFTAITAKLKEMYQASLISLGRMITMGGNAEIELIDSMDPFSEGKXVVLSIMPPKKSWRAIANLSGGEKTLASLALVFALHVFKPTPLYFMDEIDAALDFKNVSIVANYIQSKTQAAQFIVISLRNDMFELAHRLVGIYKTSNVGLVLLLVLSF

SEQ ID NO: 3358 - protein, 1469 aa, Cryptococcus neoformans
  MISC_FEATURE (419)..(419): Xaa = any amino acid
  MISC_FEATURE (591)..(591): Xaa = any amino acid
  MISC_FEATURE (850)..(850): Xaa = any amino acid
MRSTTSLQTFLVECKYFLLALLLVQPNSIVVCRKHIQFQPFTPKDIVRISEVQVSIAELYQNNEDGTRTTALQGPLDARMGPNEKGKKCATCGEDTQKCVGHYGYIKLVLPVFHIGYFRPTINMLSCICKTCARVLLPETERASFLKRFRRPNLESLQRQSAAKAVLAACKKQNICTYCGAPNGIVKKSGPLRISHEPYRAAKMASMKDEWMATFKNAVAENQAVATHLAKAVDDLNPLKVLNLFERITAEDCELLSLHPEVGRPEDYIWQYISVPPPCIRPSVASEAGNNEDDLTAKLAEIVNYNNTLALMMDLGRGIEMISSNWEVLGQAVALYINSQAPGMQTIGVSSKPIRGFVQRLKGKQGRFRGNLSGKRVDFSGRTVIGPDPNLRIDEVAVPEKVAVKLSYPERVTDYNLQXMRQAIINGSKLHPGANVLERKHENGSTVRISLNVMKDLEARKRYARELQIGDIVHRHVRDGDIVLFNRQPSLHKLSIMCHRVRVRPWRTFRLNECVCNPYNADFDGDEMNLHVPQTEEARTEALELMSVKKNLVTPRNGEPIIAAIQDFITAAYLLSRRDRFYDRQQFTQIXSYLDDANLKIEMPPPTIWKPVRLWTGKQIFNLLMRPNKESKVLVNLEAKCRTLVDPAKEDRFPPDMSPNDGYLVIQNSEIMCGVFDKNTVGDGKKNSVFGVILRDYGPEEAAQAMNRLAKIAARWLANIGFSLGINDVIPGPILHASKDARVEKAYDECDVFIDLAKKGKLENAPGCDQEATLESKISKTLSDVREAVGKICMQELSRHNAPLIMATCGSKGSVINVAQMVACVGQQIIGGSRVRNGFQDRSLPHFRKXSKNPPSKGFVRNSFFSGLTPPEFLFHAMSGREGLVDTAVKTAETGYMARRLMKALEDLCTHYDLSVRNSVGGIVQFQYGDDMLDPACLEGDATPVEYVRSWTHAYNSERPVTKDELCIPMKFAESLLEYTPSLLFLPTSLYPRLRPRVGVARNPLRRRLSLHLLSPRSGKVNTYKFVVDKIVKQMVDQRLARGLPDADDEEMAEEYEALLNSDDPAVQRVLENANKVTEAQLSSFLENCRIRYLRAKIEPGSTVGAVGAQSIGEPGTQMTLKTFHFAGVASMNVTLGVPRIKEIINAAKVISTPIIAAELAIPESETAARIVKGRIEKTVLGDIAAVIEESWTNANAYIEVHIDMDAVRRLQLEISLESIKWALVRANKLKIPEGVSAATILSSIHISQKTSRIRIWIDESDKDKGVGIYERLKFLKRAIPSVQVKGLPAIERGVVTKDEKNEKIHRLLVTGYGLSEVMGTEGVDGLKTKTNHVMETQQVLGIEAARSTIYNEIQTTMKSHGMSIDPRHVMLLGDVMTYKGEVLGITRFGVQKMKDSVLMLASFEKTTDHLFDASLYSKKDEIQGVSECIIMGSCSWLWYLSRVYRHSRSTTTLQEALAVRGGVQGGPA

SEQ ID NO: 3359 - protein, 1624 aa, Cryptococcus neoformans
MAAPEKPIVFTEHLQLTALGVQPTSISFQTLTLESDAWICVRETGDTPQVVIVNLNDAGDVVRRPITADSAIMNPRANEKILALKAGRQLQVFNLGAKAKLGTHLMNDDVTFWTWINNTTLGIVTEREVYHWKVMDGQTAPTKVFDRHANLTANQIINYRISHDEKWLVLVGISSNPNAGQPGENGFKIKGAMQLYSIERGVSQPIEGHAATFASIKLDGAPNPTKLFAFAVRSAAGAKLHIVEIGHQAPNPPFQKKAVDVFFPPEALNDFPVSLQVSQKHGILYLVTKFGFIHLYEIETGQCIYMNRISGETIFTTAEYETLSGIIGVNRKGQVLSVSVDEQTIVPYIQQTLNNPELAIKLATRAGLPGADGMIQQQYQVYIQNGQYGEAAKIAANSPRGLLRTPQTIETLKNLPAVPGTLTPILQYFGILLEKGELNKYESLELARPVVQQGKKQLLEKWLKENKLESSEELGDLCRMADMNLALSVYLRANVPNKVVACFAELGQFDKIVLYSKKVGYTPDYAQLLQHLVRINPDKGAEFATQLVNDENGPLVDLDRIVDIFMSQNMLQQATSILLDALKDNKPEQGPLQTRLLEMNLMSAPQVADAILGNEMFTHYDRPRIANLAEKAGLVQRALEHYEDINDIKRVVVHTNLFKPEWLVDYFGRLTVEQSFACLQEMLRTNLRQNLPIVVQIATKYSDLLGSVKLIELFEQFKSSDVGLYYYLGSIVNLSEDPEVHFKYIQAATRTGQIREVERICRESNFYNPEKVKNFLKEARLDDQLPLIIVCDRFDFVHDLVLYLYQNGLTNFIEIYVQRVNSARTPQVIGGLLDVDCDETTVKNLLMSVTGTFPIDDLVDEVEKRNRLKLILPWLNNKVEQGSTDHAIYNAIAKISIDSNNNPEKFLKENNLYDPAIVGKYCEKRDPYLAYIAYAKGFCDDELINITNENQMYKHQARYLVKRRDVDLWTQVLNPESIHRRALIDQIIATAIPECVDPDDVSVTVKAFMHMELHGPLLELLEKIIIEPSPFSDNRSLQSLMFLTAIKNDKGKVMGYINKLSGYDVETIAKVATEAGLYEEAFTIYQKHDMHAEAMSVLVEHMASIDRGFAYANKINEPAVWSRLGKAQLDGLRVKEAIDSYIKADDPSNFEEVIEIANRAGKHDDLVRYLQMARKTAREPKIDTELAYAYAKTDRLHDMEEFLGMTNVADVLQVGEKCFDDELYQAAKLLFSSISNWARLATTLIYLGENQAAVDAARKAGNTQVWKQVNAACVDKKEFRLAQICGLNLVVHAEELPALLSLYERNGYFDEIISLMEAGLGLERAHMGMFTELSVLYAKYRPEKLMEHLKLFWQRVNIPKVIKAAEQAHLWPELVFLYIVYDEPDNASLAMMERLADWDHDQFKKVIVKVANMEIAYRAVSFYLARQPTLLPDLLAALTPRLDHSRVIKILQTEDHLPLAKPYLIATQKLNLAVINEAYNDLLIEEEDHVTLRSSLETYDEYDAIKLAKRLEKHELLEFRRIAALLYRLNSLWEESISLSKADRLWRDALETAAASKDIAVCEELAGYFVSIGNKDAFAAILYVCFEFVRADFVEEMSWRFGLSDYSMPYKLATTRSSYQGCGA

SEQ ID NO: 3360 - protein, 1661 aa, Cryptococcus neoformans
MLRRPSVARGGDMAFKGSVNVSHSHTSLPSIVAPSLPPTPSRQQAYARPPSTIQGHRSRRSSTATTLSLSNFGPNSPGPQLSTVLITPPLQLLVSSKEAKKSPSFHAAAQRALDLCQSSEGANAAYLHPREIFEPLRLAISNPQTTSVPILVTSLDLLSKLISHSFFAEPHGPPPGLPPLPDLITHTITLSYSESSPPQVALQVVKALMAIVLSTDKGMLVHQSSLLKAVRTVYNVFLLSNDAANQVVAQGGLTQMVHHVFGRVIRPDIKNATPESGRGSAPRLPQHTVSIPVPASVADSNGAPSNQQAGQGIDEEGGSFDAMGRPIPTEQLFVKDAFLVFRALCKLTMKPLVTDSEKDLRSHAMRSKLLSLHLVLTILRSHSDIFVNPLVCIPSNSSLEMTPFLQATKQYLALSLSRNALSPVNQVFELSVEIFWCMLKDMRAQLKKEIEVLLNEIFIPILEMRHSTIRQKSIILGVFIRLCHDPQALVEIYINYDCDRSSLENIYERLMNIVSKIGQTHFAPPSKEELAQGGSSKQTSGSSGPAIPPSLSTSALGEGVGHNAPHYAGMPPEIKLRRQSLECLVAALNSLVAWSTSNPGTKAGNLEENHSTTDAVGRHHASGSVSGSIAELVAPTPIWPTDSSLKSSDDVGKFESAKQRKTNLLEGIKKFNFKPKRGIAYLLEQGFIRSNSPVDIARFLLTNEGLNKAMIGEYLGEGDDENIATMHAFVDMLDFSNMQFTDALRMYLQSFRLPGEAQKIDRFMLKFAERYMHSNPSSHFANADTAYILAFSVIMLNTDAHNKNLKQKRMTKQEFVKNNRGINDGKDLPEELLAGIYDEITTNEIKMKDEVEIPQPATSGGLASVGRDLQREAYVAQSENMASKTESLLKAMVRQQRRGVVRPTDHYHTASRLEHVRFMFEVAWMPFLAGISAPLQETDDMDVVDLCLEGLRSAIRIVCLFDMELERNAFVTTLAKFTYLSNVAEMKPKNMEAIKSLLDVAVTDGNYLKASWKDVLVCVSQLERMQLISSGMDVPDLNRTVPRTTSTDKRKPSSSKKKVPTEEVAEESRSSQVTVAADMVFSTSKNLSGSAIVDFVKALSEVSWEEIQSSGSSARPRMFSLQKLVEISYYNMGRIRLEWSNIWLILGEHFNQVCCHNNPNVSFFALDALRQLAMNFLEKEELSHFRFQKDFLRPFEYTIVHNKNSDAREMVLQCLQHMLQSRVQNLRSGWRTMFGVFSAASKVVTERVCSYAFELVTLVYRDYFSLVVKYGSFSDLTVCITDFCKVSKFQKISLQAIEMVRGLVPTMLQCPECLLPQLGDEGKVQHGDDPMVKYWLPVLHSFYEIIMTGEDLEVRRLALDCLFDTLKTHGSGFSVDFWNIVCQQVLFPIFSILRAKSDIRFKSPEVLSIWLSTTLISALRDLINLYTVYFEVMQRYLDGLLDILVACINDTLARIGTSCFEQLLEQNVRKLSPEKWMLIVSAFVQLFKTTTAYQLFDPVMCSEIEPTGNMDENDAPLEPATDKPPSLPSTISYGEQRRIFKQVIVKCVLQLLLIETTHELLQNGEVYNTIPAEHLLRLLDVLDDSWSFARKFNADKELRMQLWKVGFMKQLPNLLKQESSAAATLVNVLLKMYNDPREAHRATRKDVVKRLVVSGLLSFSA

SEQ ID NO: 3361 - protein, 2430 aa, Cryptococcus neoformans
  MISC_FEATURE (1416)..(1416): Xaa = any amino acid
  MISC_FEATURE (2090)..(2090): Xaa = any amino acid
MAALFSSAAPMRPLVLHDAATRVSVHVPASPLSAWVTSQVVAQDFQDSIVGQHTPAPVADEDEEPSAPSVEPQVKLLAQFLSFVADRAVQDASHELSEVLLAAYNRFNELFLSATNVHSLVQSFDPETRAEILKAYFKAFATAREQLGDKVQIAHPSALLEAAKDGSTELYALFGGQGVNEHYFGELQLLYDTYTPFVAPIISEITDLLISLGHKADNDGYTYYSQGLDLLSWLDGSSPQPSVEYFASIPLSLPLIGVAQLAQYVISCRVTDISPAEMRERFKGATGHSQGIVSAVAIASSNSWSSLYENILKAVKQLFYIGLRGQEGFPLLAIDPKIVSDSVENNEGVPTPMLSINGLGLKALEGHIKKVNSHLASNSQIGISLHNGPTNFVVTAPAKALYGLVTALRKVMAPAGLDQSKVPFSKRKAVFTMRFLPVNVPYHSHYLEGATQKVEKDLGEELWDAKALGMAIYHTEDGSDLRSSEISLTTSLCDQIFTRPIHWVKACNFPSTATHAVDFGPGGNSGIGPLTGRAIEGRGVRIVVVGEKGKAAAEFYDATKIRREPVWAKEWSPKLVKTLDGKVHIDTPFSRLLGKPPIMVAGMTPSTVGANLVAATLDAGYHIELAGGGHYNPKALRAKVAEIQRRVKPGVGITLNALYINQRQFSFQFPLWQEMRKEGLPIEGFCVAAGIPSSEKATEIITALKEAGIKHIAFKPGSVEGIRQVVNIAAANPDYPIIMQWTGGRAGGHHSCEDFHQPIIATYPAIRQNPNISLIAGSGFGGAEDVWPYLSGEWSVKMFGLQPMPFDGVLYASRVMVAKEADTSASVKQLIVDAPGVDDAQWEGTYDRPTGGILTVRSELGEPIHKIATRGVKLWREFDDTVFAQPREKRAAWLENKRDYVIDRLNKDFNKPWFGEKSDGTVVADIGKMTYEEITKRMVRLMYIAKQDRWIDVSLRNLVGDWLRRVEERFAGVDGIRTKESLLQSFSDLDKPLPTIESFFGTYPRAKSQLVAAEDKAFFLAICQRPGQKPVPFIPILDNNFEVWFKKDSLWAAEDVEAVFDQDPQRVCILQGPMAVKHATVVDEPIKDMLGNIEALLVKKILKEFYNNDESKVPEIDFIGAKPGKPKAGLVSESVSGDVRTLKVGKNVPALDDWLEVVAGANVSWLRAALTSVNVVQGAGYISNPFRRIFSPRAGQTVVIKSENGKAVSVTVYGAARSFGPHAADFKAVELTFNSNTNAMSLIMYEERRGVSVPLHFAFAYHPEQGYAPIHEVVEGRNKSIKDFYWRLWFGDDEKLPSLKLDTTFTCDESKVDALAVQRFCDVVGNQGEAFKSARNEKIMAPMDFAIVLGWQSVMKAIFPDDINGDLLKLVHLSNGFRMMDGVAPLRAGDACSAEARVVSVINSDSGKTVKVKGYXLRGGEPVIEISSSFLYRGKFTDYENTFETIDEDDYVVELSKPTSVGILQAKPWFEWDDDSVPLDVGTTLTFKTKSELRYKDKSTFSSVKISGAAFIRDSTKALIQVATIDYEAHNLQGNPVIEYLKRHGTAVGKPTPLENGYSLIEDPTAAVFTTPATNEPYSKISGDFNPIHVNPYFSDLASLPGTITHGMWSSAATRKYLESVVADNHPERVVSYQVGFVGMVLPGDEIQVKLTHTAMRDGKKVVKVEAFNQRGEKVIDGSAEVLQPPTTYVFTGQGSQEVGMGMELYNNSEVARAVWDVADAHLTSTYGFSIVDIVKNNPKELTIHFGGIKGQAIRQRYMDLTYDIIDENGRVKTLPLFGDIDLYTTSYTFSHPQGLLFATQYTQIALVVTEKAAFDDMKAKGLIDQNAAFAGHSLGEYSALAAIADVLPISSLADVVFFRGITMQRAVQRDAEGKSQYAMMAANPSRVGKTFNEMALREIVDTISQQKSVLLQIVNLNVANQQYVCAGELRALATLTNVLNMLKIQKIDLEKLSTMMSIEEVKEKLGEIIEGCWDMMKEKEEKDGSVILDRGFATIPLPGIDVPFHSRYLWPGVLSFRNYLVKKIDPSQLNPDRLIGKYIPNLIAEPFEVSKAYVQKIFDQTASPRMETVLNNWEKGLGIPLPKATIGLXHLDRMSCLPVSLIVDHSIGDTNWPFRFASPVRWIETQDVLFTYAKFERLIEVGPSPVLSGECPQPIVQSSTEPAYACVKVWLPEPSRPSTRPRTVPSLFNDRSCVMPRTRRRSTTRLRMRLLMRLLPPLLPLPPLLLLLWLRLLPLPPLLLPLLPVPLLLLRMFLPRPSTLSESLLLRSSRSRLARSLLASLSRSSLVESLPSRTRFLVTYKLSSPPPLKRVRISLSTSLVLLLALATPLSASTPWLLPTEWLPPSSLVDSTSPPLEPTLISNGVLVPSEPTLRCSSVSLTNLPSVSVLKQRPRPSLTSLLRATLLTAVSASHLVLLLVELAVRPAVVRS
